(19) United States
(12) Patent Application Publication
(10) Pub. No.: US 2025/0146001 A1
(43) Pub. Date: May 8, 2025

(54) Compositions and Methods for Enhancing AAV Therapy and Decreasing Tropism of AAV to the Liver

(71) Applicant: Vertex Pharmaceuticals Incorporated, Boston, MA (US)

(72) Inventors: Gregoriy Aleksandrovich Dokshin, Boston, MA (US); Jishnu Saha, Boston, MA (US)

(73) Assignee: Vertex Pharmaceuticals Incorporated, Boston, MA (US)

(21) Appl. No.: 18/919,091

(22) Filed: Oct. 17, 2024

Related U.S. Application Data
(63) Continuation of application No. PCT/US23/65850, filed on Apr. 17, 2023.
(60) Provisional application No. 63/331,968, filed on Apr. 18, 2022.

(51) Int. Cl. C12N 15/113; C07K 16/28; C12N 9/22; C12N 15/11; C12N 15/86; C12N 15/88

(52) U.S. Cl. CPC C12N 15/1138; C07K 16/28; C12N 9/22; C12N 15/111; C12N 15/86; C12N 15/88; C12N 2310/11; C12N 2310/14; C12N 2310/20; C12N 2310/351; C12N 2750/14143

(57) ABSTRACT

Compositions and methods for enhancing AAV therapy by increasing the percentage of AAV delivered to a non-liver target in a subject by blocking binding of binding of AAVs to AAV receptors in the liver and then administering an AAV therapy targeting a non-liver tissue.

[0001] This application is a continuation of International Application No. PCT/US2023/065850, filed on Apr. 17, 2023, which claims the benefit of priority to U.S. Provisional Application No. 63/331,968, filed Apr. 18, 2022, both of which are incorporated herein by reference in their entireties.

[0002] The instant application contains a Sequence Listing which has been submitted electronically in XML format and is hereby incorporated by reference in its entirety. Said XML copy, created on Apr. 15, 2023, is named 01245-0037-00PCT_Sequence_Listing and is 8,090,000 bytes in size.

### INTRODUCTION AND SUMMARY

[0003] Genetic drugs, oligonucleotides such as small interfering RNA (siRNA), messenger RNA (mRNA), antisense oligonucleotides (ASOs) and plasmid DNA, provide the potential for regulating and editing gene expression. ASOs may work by downregulation of a molecular target, usually achieved by induction of RNase H endonuclease activity that cleaves an RNA-DNA heteroduplex with a significant reduction of the target gene translation. Other ASO-driven mechanisms may include inhibition of 5′ cap formation, splice-switching, or steric hindrance of ribosomal activity. siRNAs in particular are short (19-21 nucleotide), double-stranded RNAs that use the natural RNA interference (RNAi) mechanisms and degrade complementary mRNAs through the use of complicated protein machinery. As a result, siRNA can lead to the reversible knock down in vivo of a protein of interest. However, naked RNA or DNA molecules face rapid degradation in vivo, complex immune responses, and impermissible cellular uptake. Thus, delivery of these drugs requires a sophisticated delivery system.

[0004] Adeno-associated viruses (AAV) vectors have traditionally been a leading candidate for in vivo virus-based gene therapy because of their broad tissue tropism, non-pathogenic nature and low immunogenicity. Currently 12 AAV serotypes and over 100 variants have been identified in human and nonhuman primate populations. Gene therapy vectors using AAV in vivo can infect both dividing and quiescent cells and persist in an extrachromosomal state without integrating into the genome of the host cell, although in the native virus some integration of virally carried genes into the host genome does occur. These features make AAV a very attractive candidate for creating viral vectors for gene therapy, and for the creation of isogenic human disease models. See S. Pillay, Nature, 530(7588): 108-112 (2016).

[0005] AAV variants have or have been engineered with specific tropisms to allow for efficacious localized or systemic administration with targeted gene therapy delivery. Subtle variations in primary and secondary receptor interactions for AAV variants can yield variants or serotypes possessing particular tropisms where the AAV preferentially infects one tissue or cell type over others. See Naso et al., BioDrugs, 31:317-334 (2017). As a non-limiting example, skeletal muscle has been shown to be a target tissue effectively transduced by many AAV serotypes and variants. Targeted delivery of gene therapy to reconstitute deficient muscle structural proteins or enzymes can be used to treat many diseases that disable muscle fibers throughout the body. Additionally, once transduced, muscle serves as a production site for protein products. Muscle can be targeted as a biofactory to synthesize and secrete therapeutic agents or secretory proteins, e.g., factor VIII and IX and erythropoietin, that can act locally or systemically to treat, e.g., diabetes, atherosclerosis, hemophilia, cancer and other infectious diseases. See Wang, Expert Opin Drug Deliv., 11(3): 345-364 (2014). Direct central nervous system delivery, local delivery of AAV to cardiac muscles, and inhaled pulmonary delivery are other non-limiting exemplary AAV gene therapy applications.

[0006] However, AAV vectors are limited by several factors, including their small packaging size. Moreover, current limitations of using AAVs for gene transfer include potential safety concerns, including off-target toxicity. Following administration, in addition to localized and targeted delivery, most serotypes of AAV may also achieve off-target gene transfer, which can result in transduction and expression of the gene of interest in unwanted cells or tissues. When AAV vectors reach the bloodstream, the circulatory system carries the vectors to the whole body, including to the liver, skeletal and cardiac muscles, pancreas and adrenal glands. While different AAV serotypes can have distinct tissue distribution patterns after administration, the liver is the most common organ harboring a large amount of mis-targeted AAV vectors. A recent biodistribution animal study found that, despite direct cerebrospinal fluid administration, biodistribution of vector DNA and green fluorescent protein (GFP) expression was widespread. See Meseck et al., doi.org/10.1101/2021.11.28.470258, BioRxiv.org (posted Nov. 28, 2021). In a portion of that study, the transduction and expression of scAAV9-CB-GFP in the CNS and peripheral tissues following a single intrathecal infusion into the cerebrospinal fluid was assessed. In that study, vector DNA and GFP expression was found to be the greatest in the spinal cord, dorsal root ganglia, and systemic tissue (e.g., liver) with lower concentrations in many brain regions. Recently in 2020-2021, a gene therapy clinical trial using AAV gene therapy was paused due in part to deaths of subjects who developed complications from liver failure. See NCT03199469 (using an AAV serotype 8 vector). There is an urgent need to address the issue of secondary liver toxicity in AAV-gene therapy.

[0007] Current methods of addressing the issue of secondary liver toxicity include trying to reduce liver tropism by modifying the AAVs to promote tropism to the intended targets. This includes using recombinant techniques to engineer the makeup of the AAV to enhance specific tropism to the intended target, such as capsid shuffling, directed evolution, and random peptide library insertions, in addition to inserting larger binding proteins into different regions of AAV capsid proteins to derive variants and confer selectivity. See Naso et al., BioDrugs, 31:317-334 (2017). One other such method is using tissue-specific promotors to drive transcription in the intended targets and not in the mis-targeted tissue. Another such method is to design the transgene to carry a target sequence of microRNAs (miRNAs) that are expressed specifically in the target tissue or cell type, for example, incorporating target sequences into the 3′-UTRs to reduce transgene expression in undesired tissues, while maintaining transgene expression in the target. Wang, Expert Opin Drug Deliv., 11(3): 345-364 (2014). Notably, however, each of these methods is individualized for the particular therapy. Namely, they involve designing aspects of particular AAV serotypes or variants and/or transgenes and/or using promoters to enhance tropism to the specific target. These modifications to the specific vectors, transgenes, and/or promoters tend to be therapy-specific and cannot necessarily be applied to all AAV-gene therapy systems for reducing secondary liver toxicity.

[0008] Thus, there exists a need in the art to reduce hepatotoxicity from AAVs that can apply to all AAVs and administration of all transgenes regardless of the intended target and type of delivery.

[0009] Rather than enhance tropism to the intended non-liver target, the present invention, in part, seeks to de-target the liver by knocking down or blocking the receptors for AAVs in the liver, for example, as a pre-conditioning therapy prior to receiving the AAV-gene therapy directed to the non-liver target. Administration of RNA interference (RNAi)-based therapeutics, including using small interfering RNA (siRNA) or GalNAc-conjugated RNAi or LNP-assisted RNAi, or antisense oligonucleotides (ASOs), for example, prior to AAV administration could effectively and temporarily block subsequent binding of the AAV capsid to AAVR in the liver. Using ASOs or siRNAs in vivo is known to generally be transient. Because RNAi-based pre-conditioning can be administered prior to the AAV, and can later be cleared from the body, it can effectively and temporarily block binding to AAVR in the liver, thereby enhancing the tropism of the AAVs to the intended non-liver target without long term effects. The present compositions and methods can be used as a platform to enhance the tropism and thus efficacy and safety of non-liver AAV-mediated gene therapies.

[0010] Accordingly, the following non-limiting embodiments are provided:
[0011] Embodiment 1 is a composition comprising an agent that blocks AAV binding to an AAV receptor (AAVR) and a delivery molecule that delivers the agent to the liver.
[0012] Embodiment 2 is the composition of embodiment 1, wherein the agent comprises a small-interfering RNA (siRNA).
[0013] Embodiment 3 is the composition of embodiment 2, wherein the siRNA comprises at least 19 contiguous nucleotides of any of SEQ ID Nos: 4300-9527.
[0014] Embodiment 4 is the composition of embodiment 3, wherein the siRNA comprises any of the sequences of SEQ ID Nos: 4300-9527.
[0015] Embodiment 5 is the composition of embodiment 4, wherein the siRNA is no more than 21, 25, or 31 nucleotides in length.
[0016] Embodiment 6 is the composition of embodiment 1, wherein the agent comprises an anti-AAVR antibody.
[0017] Embodiment 7 is the composition of embodiment 1, wherein the agent comprises a small molecule.
[0018] Embodiment 8 is the composition of embodiment 1, wherein the agent comprises an antisense oligonucleotide (ASO).
[0019] Embodiment 9 is the composition of embodiment 8, wherein the ASO comprises any of the sequences of SEQ ID Nos: 9600-9623, or comprises at least 14 consecutive nucleotides of any of SEQ ID Nos: 9600-9623.
[0020] Embodiment 10 is the composition of any one of embodiments 1-9, wherein the delivery molecule comprises one or more of the following: lactose, galactose, N-acetylgalactosamine (GalNAc), galactosamine, N-formylgalactosamine, N-acetylgalactosamine, N-propionylgalactosamine, N-butanoylgalactosamine, N-isobutanoyl-galactosamine, and cholesterol, or a derivative thereof.
[0021] Embodiment 11 is the composition of embodiment 10, wherein the delivery molecule comprises N-acetylgalactosamine (GalNAc).
[0022] Embodiment 12 is the composition of any one of embodiments 1-9, wherein the delivery molecule comprises a lipid nanoparticle (LNP).
[0023] Embodiment 13 is the composition of any one of embodiments 1-9, wherein the delivery molecule comprises an AAV.
[0024] Embodiment 14 is a method comprising: (a) administering to a subject an agent that blocks AAV binding to an AAV receptor (AAVR) in the liver, and then (b) administering an AAV vector to the subject.
[0025] Embodiment 15 is the method of embodiment 14, wherein the AAV vector further comprises a payload.
[0026] Embodiment 16 is the method of embodiment 15, wherein the payload comprises a therapeutic agent to prevent or treat disease.
[0027] Embodiment 17 is the method of embodiment 15, wherein the payload comprises a guide RNA, an endonuclease, a tRNA, a small molecule, an ASO, an antibody, an siRNA, or an RNAi agent.
[0028] Embodiment 18 is a method of increasing the percentage of AAV delivered to a non-liver target in a subject, comprising (a) a pre-conditioning step comprising administering to the subject a composition comprising an agent that blocks AAV binding to an AAV receptor (AAVR) in the liver, and then (b) administering an AAV vector targeting a non-liver tissue.
[0029] Embodiment 19 is the method of any one of embodiments 14-18, wherein step (a) comprises administering to the subject the composition of any one of embodiments 1-13.
[0030] Embodiment 20 is a method of decreasing tropism of AAV to the liver in a subject comprising (a) administering to the subject a composition of any one of embodiments 1-13, and then (b) administering an AAV vector targeting a non-liver tissue.
[0031] Embodiment 21 is the method of any of embodiments 14-20, wherein administering to the subject the composition and/or agent that blocks AAV binding to an AAV receptor (AAVR) in the liver temporarily blocks AAV binding to AAV receptors in the liver.
[0032] Embodiment 22 is the method of any of embodiments 14-20, wherein administering to the subject the composition and/or agent that blocks AAV binding to an AAV receptor (AAVR) in the liver is part of the pre-conditioning step.
[0033] Embodiment 23 is the method of any of embodiments 14-20, wherein administering to the subject the composition and/or agent that blocks AAV binding to an AAV receptor (AAVR) in the liver occurs about 2 days, about 3 days, about 4 days, about 5 days, about 6 days, about 7 days, about 8 days, about 9 days, about 10 days, about 11 days, about 12 days, about 13 days, about 14 days, about 15 days, about 16, days, about 17 days, about 18 days, about 19 days, about 20 days, or about 21 days prior to administering the AAV vector.
[0034] Embodiment 24 is the method of any of embodiments 14-20, wherein administering to the subject the composition and/or agent that blocks AAV binding to an AAV receptor (AAVR) in the liver occurs about 1 day, about 2 days, about 3 days, about 4 days, about 5 days, about 6 days, about 7 days prior to administering the AAV vector.
[0035] Embodiment 25 is the method of any of embodiments 14-20, wherein administering to the subject the composition and/or agent that blocks AAV binding to an AAV receptor (AAVR) in the liver occurs about 7 days, about 8 days, about 9 days, about 10 days, about 11 days, about 12 days, about 13 days, or about 14 days prior to administering the AAV vector.
[0036] Embodiment 26 is the method of any of embodiments 14-20, wherein administering to the subject the composition of any one of embodiments 1-13 immediately precedes administering the AAV vector.
[0037] Embodiment 27 is the method of any of embodiments 14-20, wherein the composition of any one of embodiments 1-10 and the AAV vector are co-administered.
[0038] Embodiment 28 is the method of any of embodiments 14-20, wherein step (a) comprises administering to the subject a composition comprising a small-interfering RNA (siRNA) or an antisense oligonucleotide (ASO).
[0039] Embodiment 29 is the method of any of embodiment 28, wherein the composition comprises small-interfering RNA (siRNA) that is conjugated to a liver-targeting moiety.
[0040] Embodiment 30 is the method of embodiment 29, wherein the composition comprises N-acetylgalactosamine (GalNAc)-conjugated siRNA.
[0041] Embodiment 31 is the method of embodiment 28, wherein the composition comprises small-interfering RNA (siRNA) encapsulated in a lipid nanoparticle (LNP).
[0042] Embodiment 32 is the method of embodiment 28, wherein the composition comprises an ASO.
[0043] Embodiment 33 is the method of any one of embodiments 14-32, wherein the composition comprises a pharmaceutically acceptable carrier.
[0044] Embodiment 34 is the method of embodiment 33, wherein the method comprises administering by intraperitoneal injection.
[0045] Embodiment 35 is the method of embodiment 34, wherein the ASO is administered about 1 day, about 2 days, about 3 days, about 4 days, about 5 days, about 6 days, about 7 days prior to administering the AAV vector.
[0046] Embodiment 36 is the method of embodiment 34, wherein the ASO is administered between about 24 and about 48 hours prior to administering the AAV vector.
[0047] Embodiment 37 is the method of embodiment 34, wherein the ASO is administered about 24 hours prior to administering the AAV vector.
[0048] Embodiment 38 is the method of embodiment 34, wherein the ASO is administered about 48 hours prior to administering the AAV vector.
[0049] Embodiment 39 is the method of any of embodiments 31-38, wherein the method comprises co-administering other drugs that facilitate increased uptake of the siRNA or ASO in the liver.
[0050] Embodiment 40 is the method of any of any of embodiments 14-39, wherein the blocking of AAV binding to AAV receptors in the liver in step (a) is not temporary.
[0051] Embodiment 41 is the method of embodiment 39, wherein the composition comprises an anti-AAV antibody that blocks AAV binding to AAV receptors.
[0052] Embodiment 42 is the method of any of embodiments 14-41, wherein the AAV vector is intended for the brain; central nervous system; spinal cord; eye; retina; bone; cardiac muscle, skeletal muscle, and/or smooth muscle; lung; pancreas; heart; and/or kidney.
[0053] Embodiment 43 is the method of any of embodiments 14-42, wherein the AAV vector is intended for cardiac muscle, skeletal muscle, and/or smooth muscle.
[0054] Embodiment 44 is the method of any one of embodiments 14-43, wherein administering the composition in step (a) increases the percentage of AAV delivered to the non-liver target.
[0055] Embodiment 45 is the method of any one of embodiments 14-44, wherein the method results in at least a 10%, 30%, 50%, 75%, 100%, 125%, 150%, 200%, 250%, 300%, 350%, 400%, 450%, 500%, 600%, 700%, 800%, 900%, or 1000% increase of AAV in brain; central nervous system; spinal cord; eye; retina; bone; cardiac muscle, skeletal muscle, and/or smooth muscle; lung; pancreas; heart; and/or kidney as compared to the AAV in the corresponding tissue of a control subject that received the AAV but did not receive the agent that blocks AAV binding to an AAV receptor (AAVR) in the liver.
[0056] Embodiment 46 is the method of embodiment 45, the method results in at least a 10%, 30%, 50%, 75%, 100%, 125%, 150%, 200%, 250%, 300%, 350%, 400%, 450%, 500%, 600%, 700%, 800%, 900%, or 1000% increase of AAV in skeletal muscle as compared to the AAV in the corresponding muscle of a control subject that received the AAV but did not receive the agent.
[0057] Embodiment 47 is the method of any one of embodiments 14-46, wherein the AAV vector further comprises molecules for enhancing tropism for the target host cells or tissue.
[0058] Embodiment 48 is the method of any of embodiments 14-47, wherein the subject is a human subject.
[0059] Embodiment 49 is the method of any one of embodiments 14-48, wherein the AAV vector comprises a single nucleic acid molecule encoding one or more guide RNAs and a Cas9, wherein the single nucleic acid molecule comprises:
   [0060] a. a first nucleic acid encoding one or more spacer sequences selected from any one of SEQ ID NOs: 1-35, 1000-1078, or 3000-3069 and a second nucleic acid encoding a Staphylococcus aureus Cas9 (SaCas9); or
   [0061] b. a first nucleic acid encoding one or more spacer sequences selected from any one of SEQ ID NOs: 100-225, 2000-2116, or 4000-4251 and a second nucleic acid encoding a Staphylococcus lugdunensis (SluCas9); or
   [0062] c. a first nucleic acid encoding one or more spacer sequences comprising at least 20 contiguous nucleotides of a spacer sequence selected from any one of SEQ ID NOs: 1-35, 1000-1078, or 3000-3069 and a second nucleic acid encoding a Staphylococcus aureus Cas9 (SaCas9); or
   [0063] d. a first nucleic acid encoding one or more spacer sequences comprising at least 20 contiguous nucleotides of a spacer sequence selected from any one of SEQ ID NOs: 100-225, 2000-2116, or 4000-4251 and a second nucleic acid encoding a Staphylococcus lugdunensis (SluCas9); or
   [0064] e. a first nucleic acid encoding one or more spacer sequences that is at least 90% identical to any one of SEQ ID NOs: 1-35, 1000-1078, or 3000-3069 and a second nucleic acid encoding a Staphylococcus aureus Cas9 (SaCas9); or
   [0065] f. a first nucleic acid encoding one or more spacer sequences that is at least 90% identical to any one of SEQ ID NOs: 100-225, 2000-2116, or 4000-4251 and a second nucleic acid encoding a Staphylococcus lugdunensis (SluCas9); or
   [0066] g. a first nucleic acid encoding a pair of guide RNAs comprising a first and second spacer sequence selected from any one of the following pairs of spacer sequences: SEQ ID NOs: 10 and 15; 10 and 16; 12 and 16; 1001 and 1005; 1001 and 15; 1001 and 16; 1003 and 1005; 16 and 1003; 12 and 1010; 12 and 1012; 12 and 1013; 10 and 1016; 1017 and 1005; 1017 and 16; 1018 and 16; 15 and 10; 16 and 10; 16 and 12; 1005 and 1001; 15 and 1001; 16 and 1001; 1005 and 1003; 1003 and 16; 1010 and 12; 1012 and 12; 1013 and 12; 1016 and 10; 1005 and 1017; 16 and 1017; and 16 and 1018; and a second nucleic acid encoding a Staphylococcus aureus Cas9 (SaCas9); or
   [0067] h. a first nucleic acid encoding a pair of guide RNAs comprising at least 17, 18, 19, 20, or 21 contiguous nucleotides of a first and second spacer sequence selected from any one of the following pairs of spacer sequences: SEQ ID NOs: 10 and 15; 10 and 16; 12 and 16; 1001 and 1005; 1001 and 15; 1001 and 16; 1003 and 1005; 16 and 1003; 12 and 1010; 12 and 1012; 12 and 1013; 10 and 1016; 1017 and 1005; 1017 and 16; 1018 and 16; 15 and 10; 16 and 10; 16 and 12; 1005 and 1001; 15 and 1001; 16 and 1001; 1005 and 1003; 1003 and 16; 1010 and 12; 1012 and 12; 1013 and 12; 1016 and 10; 1005 and 1017; 16 and 1017; and 16 and 1018; and a second nucleic acid encoding a Staphylococcus aureus Cas9 (SaCas9); or
   [0068] i. a first nucleic acid encoding a pair of guide RNAs that is at least 90% identical to a first and second spacer sequence selected from any one of the following pairs of spacer sequences: SEQ ID NOs: 10 and 15; 10 and 16; 12 and 16; 1001 and 1005; 1001 and 15; 1001 and 16; 1003 and 1005; 16 and 1003; 12 and 1010; 12 and 1012; 12 and 1013; 10 and 1016; 1017 and 1005; 1017 and 16; 1018 and 16; 15 and 10; 16 and 10; 16 and 12; 1005 and 1001; 15 and 1001; 16 and 1001; 1005 and 1003; 1003 and 16; 1010 and 12; 1012 and 12; 1013 and 12; 1016 and 10; 1005 and 1017; 16 and 1017; and 16 and 1018; and a second nucleic acid encoding a Staphylococcus aureus Cas9 (SaCas9); or
   [0069] j. a first nucleic acid encoding a pair of guide RNAs comprising a first and second spacer sequence selected from any one of the following pairs of spacer sequences: SEQ ID NOs: 148 and 134; 149 and 135; 150 and 135; 131 and 136; 151 and 136; 139 and 131; 139 and 151; 140 and 131; 140 and 151; 141 and 148; 144 and 149; 144 and 150; 145 and 131; 145 and 151; 146 and 148; 134 and 148; 135 and 149; 135 and 150; 136 and 131; 136 and 151; 131 and 139; 151 and 139; 131 and 140; 151 and 140; 148 and 141; 149 and 144; 150 and 144; 131 and 145; 151 and 145; and 148 and 146; and a second nucleic acid encoding a Staphylococcus lugdunensis (SluCas9); or
   [0070] k. a first nucleic acid encoding a pair of guide RNAs comprising at least 17, 18, 19, 20, or 21 contiguous nucleotides of a first and second spacer sequence selected from any one of the following pairs of spacer sequences: SEQ ID NOs: 148 and 134; 149 and 135; 150 and 135; 131 and 136; 151 and 136; 139 and 131; 139 and 151; 140 and 131; 140 and 151; 141 and 148; 144 and 149; 144 and 150; 145 and 131; 145 and 151; 146 and 148; 134 and 148; 135 and 149; 135 and 150; 136 and 131; 136 and 151; 131 and 139; 151 and 139; 131 and 140; 151 and 140; 148 and 141; 149 and 144; 150 and 144; 131 and 145; 151 and 145; and 148 and 146; and a second nucleic acid encoding a Staphylococcus lugdunensis (SluCas9); or
   [0071] l. a first nucleic acid encoding a pair of guide RNAs that is at least 90% identical to a first and second spacer sequence selected from any one of the following pairs of spacer sequences: SEQ ID NOs: 148 and 134; 149 and 135; 150 and 135; 131 and 136; 151 and 136; 139 and 131; 139 and 151; 140 and 131; 140 and 151; 141 and 148; 144 and 149; 144 and 150; 145 and 131; 145 and 151; 146 and 148; 134 and 148; 135 and 149; 135 and 150; 136 and 131; 136 and 151; 131 and 139; 151 and 139; 131 and 140; 151 and 140; 148 and 141; 149 and 144; 150 and 144; 131 and 145; 151 and 145; and 148 and 146; and a second nucleic acid encoding a Staphylococcus lugdunensis (SluCas9); or
   [0072] m. a first nucleic acid encoding a pair of guide RNAs that is at least 90% identical to a first and second spacer sequence selected from any one of the following pairs of spacer sequences:
      [0073] i. SEQ ID NOS: 148 and 134,
      [0074] ii. SEQ ID Nos: 145 and 131,
      [0075] iii. SEQ ID Nos: 144 and 149;
      [0076] iv. SEQ ID Nos: 144 and 150;
      [0077] v. SEQ ID Nos: 146 and 148;
[0078] and a second nucleic acid encoding a Staphylococcus lugdunensis (SluCas9); or
   [0079] n. a first nucleic acid encoding a pair of guide RNAs that is at least 90% identical to a first and second spacer sequence selected from any one of the following pairs of spacer sequences:
      [0080] i. SEQ ID NOs: 12 and 1013; and
      [0081] ii. SEQ ID Nos: 12 and 1016;
[0082] and a second nucleic acid encoding a SaCas9-KKH.
[0083] Embodiment 50 is the method of any one of embodiments 14-49, wherein the AAV vector is between 3.9-5 kb, 4-5 kb, 4.2-5 kb, 4.4-5 kb, 4.6-5 kb, 4.7-5 kb, 3.9-4.9 kb, 4.2-4.9 kb, 4.4-4.9 kb, 4.7-4.9 kb, 3.9-4.85 kb, 4.2-4.85 kb, 4.4-4.85 kb, 4.6-4.85 kb, 4.7-4.85 kb, 4.7-4.9 kb, 3.9-4.8 kb, 4.2-4.8 kb, 4.4-4.8 kb or 4.6-4.8 kb from ITR to ITR in size, inclusive of both ITRs.
[0084] Embodiment 51 is the method of any one of embodiments 14-50, wherein the AAV vector is an AAV9 vector.
[0085] Embodiment 52 is the method of any one of embodiments 14-51, wherein the agent is an siRNA.
[0086] Embodiment 53 is the method of embodiment 52, wherein the siRNA comprises at least 19 contiguous nucleotides of any of SEQ ID Nos: 4300-9527.
[0087] Embodiment 54 is the method of embodiment 52, wherein the siRNA comprises any of the sequences of SEQ ID Nos: 4300-9527.
[0088] Embodiment 55 is The method of embodiment 52, wherein the siRNA comprises at least 19 contiguous nucleotides of any of SEQ ID Nos: 9508-9531.
[0089] Embodiment 56 is The method of embodiment 52, wherein the siRNA comprises any of the sequences of SEQ ID Nos: 9508-9531.
[0090] Embodiment 57 is the method of any one of embodiments 52-56 wherein the siRNA is no more than 21, 25, or 31 nucleotides in length.
[0091] Embodiment 58 is the method of any one of embodiments 14-51, wherein the agent comprises an anti-AAVR antibody.
[0092] Embodiment 59 is the method of any one of embodiments 14-51, wherein the agent comprises a small molecule.
[0093] Embodiment 60 is the method of any one of embodiments 14-51, wherein the agent comprises an antisense oligonucleotide (ASO).
[0094] Embodiment 61 is the method of embodiment 60, wherein the ASO comprises any of the sequences of SEQ ID Nos: 9600-9623, or comprises at least 14 consecutive nucleotides of any of SEQ ID Nos: 9600-9623.
[0095] Embodiment 62 is the method of embodiment 60, wherein the ASO is between 14-35, 15-30, or 15-25 nucleotides in length.

### BRIEF DESCRIPTION OF THE DRAWINGS

[0096] FIGS. 1A-1J show knockdown of AAVR mRNA by 10 different siRNAs in Hepa1-6 cells. Plots show 10-point dose response for each of the 10 siRNAs evaluated. FIG. 1K provides a representative structure for a modified siRNA sequence used in the assessment.

[0097] FIG. 2 shows knockdown of AAVR mRNA with different MOE- or LNA-based ASOs in C2C12 cells. The plot shows fold change in AAVR mRNA levels relative to untreated samples, as measured by qPCR 48 hours after treatment with 50 nM ASO. The dashed line indicates the level of mRNA expression for the untreated samples. Error bars indicate standard deviation. On the horizonal axis, “siRNA” refers to siRNAVT011 targeting AAVR (positive control); “lipo” refers to RNAiMax Lipofectamine only (negative control); “untreated”—refers to samples with no lipofectamine (negative control).

[0098] FIG. 3 shows knockdown of AAVR mRNA with different LNA-based ASOs in Huh7 cells. The plot shows fold change in AAVR mRNA levels relative to untreated samples, as measured by qPCR 48 hours after treatment with 10, 50, 100 or 200 nM ASO. The dashed line indicates the level of mRNA expression for the untreated samples. On the horizonal axis, “siRNA” refers to siRNAVT011 targeting AAVR (positive control); “lipo” refers to RNAiMax Lipofectamine only (negative control); “scram” refers to non-targeting siRNA (IDT Cat #51-01-14-03) (negative control); “untreated”—refers to samples with no lipofectamine (negative control). For each ASO, nM concentration of ASO is indicated as a number in the name.

[0099] FIGS. 4A-4D show the time course of AAV receptor mRNA and protein expression after ASO treatment. FIGS. 4A and 4C show fold change in AAVR mRNA levels by qPCR relative to untreated samples, FIGS. 4B and 4D are images of Western Blot detection results for AAV receptor protein and beta-actin from cell lysates. FIGS. 4A and 4B show mRNA and protein panels for untreated samples and FIGS. 4C and 4D show mRNA and protein panels for the treated samples, with time points as indicated in hours. Error bars show standard deviation.

[0100] FIGS. 5A-B show bright field images of control and preconditioned samples 72 h post AAV9-GFP (Vector Biolabs Cat #7007) infection. FIG. 5A shows control untreated cells; FIG. 5B shows preconditioned cells dosed with ASOVTO02 (250 nM).

[0101] FIGS. 6A-B show GFP transgene expression in Huh7 cells. FIGS. 6A-B show representative fluorescent images of control and preconditioned samples 72 h post AAV9-GFP (Vector Biolabs Cat #7007) infection. FIG. 6A shows control untreated cells; FIG. 6B shows preconditioned cells dosed with LNA-1 (250 nM).

[0102] FIG. 7 shows AAV receptor protein quantification 7 days after dosing with AAVR-targeting ASO at 2, 7 or 20 mg/kg doses, 20 mg/kg of control ASO, or PBS. The data were normalized to PBS treated samples. Error bars represent standard deviation from the mean.

[0103] FIGS. 8A and 8B show AAV receptor protein levels in heart and muscle 7 days post dosing with AAVR ASO (ASOVT002) at 20 mg/kg or PBS treated animals. The data were normalized to PBS treated samples. Error bars represent standard deviation from the mean.

[0104] FIG. 9 shows AAV receptor protein quantification after 3-, 7- and 10-days post dosing with AAVR ASO (ASOVT002) at 20 mg/kg, or PBS treatment. The data were normalized to PBS treated samples. Error bars represent standard deviation from the mean.

[0105] FIG. 10 is a graphical representation of the in vivo study design to test effects of ASO-based AAVR knockdown on AAV distribution corresponding to the study in Example 6.

### DETAILED DESCRIPTION

[0106] Reference will now be made in detail to certain embodiments of the invention. While the invention is described in conjunction with the illustrated embodiments, it will be understood that they are not intended to limit the invention to those embodiments. On the contrary, the invention is intended to cover all alternatives, modifications, and equivalents, which may be included within the invention as defined by the appended claims and included embodiments.

[0107] Before describing the present teachings in detail, it is to be understood that the disclosure is not limited to specific compositions or process steps, as such may vary. It should be noted that, as used in this specification and the appended claims, the singular form “a,” “an,” and “the” include plural references unless the context clearly dictates otherwise. Thus, for example, reference to “a guide” includes a plurality of guides and reference to “a cell” includes a plurality of cells and the like.

[0108] Numeric ranges are inclusive of the numbers defining the range. Measured and measurable values are understood to be approximate, taking into account significant digits and the error associated with the measurement. Also, the use of “comprise”, “comprises”, “comprising”, “contain”, “contains”, “containing”, “include”, “includes”, and “including” are not intended to be limiting. It is to be understood that both the foregoing general description and detailed description are exemplary and explanatory only and are not restrictive of the teachings.

[0109] Unless specifically noted in the specification, embodiments in the specification that recite “comprising” various components are also contemplated as “consisting of” or “consisting essentially of” the recited components; embodiments in the specification that recite “consisting of” various components are also contemplated as “comprising” or “consisting essentially of” the recited components; and embodiments in the specification that recite “consisting essentially of” various components are also contemplated as “consisting of” or “comprising” the recited components (this interchangeability does not apply to the use of these terms in the claims). The term “or” is used in an inclusive sense, i.e., equivalent to “and/or,” unless the context clearly indicates otherwise.

[0110] The section headings used herein are for organizational purposes only and are not to be construed as limiting the desired subject matter in any way. In the event that any material incorporated by reference contradicts any term defined in this specification or any other express content of this specification, this specification controls. While the present teachings are described in conjunction with various embodiments, it is not intended that the present teachings be limited to such embodiments. On the contrary, the present teachings encompass various alternatives, modifications, and equivalents, as will be appreciated by those of skill in the art.

### I. Definitions

[0111] Unless stated otherwise, the following terms and phrases as used herein are intended to have the following meanings:

[0112] “Polynucleotide,” “nucleic acid,” and “nucleic acid molecule,” are used herein to refer to a multimeric compound comprising nucleosides or nucleoside analogs which have nitrogenous heterocyclic bases or base analogs linked together along a backbone, including conventional RNA, DNA, mixed RNA-DNA, and polymers that are analogs thereof. A nucleic acid “backbone” can be made up of a variety of linkages, including one or more of sugar-phosphodiester linkages, peptide-nucleic acid bonds (“peptide nucleic acids” or PNA; PCT No. WO 95/32305), phosphorothioate linkages, methylphosphonate linkages, or combinations thereof. Sugar moieties of a nucleic acid can be ribose, deoxyribose, or similar compounds with substitutions, e.g., 2′ methoxy or 2′ halide substitutions. Nitrogenous bases can be conventional bases (A, G, C, T, U), analogs thereof (e.g., modified uridines such as 5-methoxyuridine, pseudouridine, or N1-methylpseudouridine, or others); inosine; derivatives of purines or pyrimidines (e.g., N⁴-methyl deoxyguanosine, deaza- or aza-purines, deaza- or aza-pyrimidines, pyrimidine bases with substituent groups at the 5 or 6 position (e.g., 5-methylcytosine), purine bases with a substituent at the 2, 6, or 8 positions, 2-amino-6-methylaminopurine, O⁶-methylguanine, 4-thio-pyrimidines, 4-amino-pyrimidines, 4-dimethylhydrazine-pyrimidines, and O⁴-alkyl-pyrimidines; U.S. Pat. No. 5,378,825 and PCT No. WO 93/13121). For general discussion see The Biochemistry of the Nucleic Acids 5-36, Adams et al., ed., 11^{th} ed., 1992). Nucleic acids can include one or more “abasic” residues where the backbone includes no nitrogenous base for position(s) of the polymer (U.S. Pat. No. 5,585,481). A nucleic acid can comprise only conventional RNA or DNA sugars, bases and linkages, or can include both conventional components and substitutions (e.g., conventional bases with 2′ methoxy linkages, or polymers containing both conventional bases and one or more base analogs). Nucleic acid includes “locked nucleic acid” (LNA), an analogue containing one or more LNA nucleotide monomers with a bicyclic furanose unit locked in an RNA mimicking sugar conformation, which enhance hybridization affinity toward complementary RNA and DNA sequences (Vester and Wengel, 2004, Biochemistry 43(42):13233-41). RNA and DNA have different sugar moieties and can differ by the presence of uracil or analogs thereof in RNA and thymine or analogs thereof in DNA. The disclosure provides a number of exemplary nucleotide sequences herein, and contemplates reverse complements of these nucleotide sequences, as well as RNA and/or DNA equivalents of any of these sequences. For example, an RNA equivalent of any of the DNA sequences disclosed herein would comprise uracils in place of thymines in the sequence, whereas a DNA equivalent of any of the RNA sequences disclosed herein would comprise thymines in place of uracils.

[0113] As used herein, “CRISPR” systems and “RNA-targeted endonucleases” or “Cas-nucleases” includes the type II CRISPR systems of S. pyogenes, S. aureus, and other prokaryotes (see, e.g., the list in the next paragraph), and modified (e.g., engineered or mutant) versions thereof. See, e.g., US2016/0312198 A1; US 2016/0312199 A1. In particular embodiments, the RNA-targeted endonuclease is a type II CRISPR Cas enzyme. Other examples of Cas nucleases include a Csm or Cmr complex of a type III CRISPR system or the Cas10, Csml, or Cmr2 subunit thereof; and a Cascade complex of a type I CRISPR system, or the Cas3 subunit thereof. In some embodiments, the Cas nuclease may be from a Type-IIA, Type-IIB, or Type-IIC system. For discussion of various CRISPR systems and Cas nucleases see, e.g., Makarova et al., Nat. Rev. Microbiol., 9:467-477 (2011); Makarova et al., Nat. Rev. Microbiol., 13: 722-36 (2015); Shmakov et al., Molecular Cell, 60:385-397 (2015).

[0114] Non-limiting exemplary species that the Cas nuclease can be derived from include Streptococcus pyogenes, Streptococcus thermophilus, Streptococcus sp., Staphylococcus aureus, Listeria innocua, Lactobacillus gasseri, Francisella novicida, Wolinella succinogenes, Sutterella wadsworthensis, Gammaproteobacterium, Neisseria meningitidis, Campylobacter jejuni, Pasteurella multocida, Fibrobacter succinogene, Rhodospirillum rubrum, Nocardiopsis dassonvillei, Streptomyces pristinaespiralis, Streptomyces viridochromogenes, Streptomyces viridochromogenes, Streptosporangium roseum, Streptosporangium roseum, Alicyclobacillus acidocaldarius, Bacillus pseudomycoides, Bacillus selenitireducens, Exiguobacterium sibiricum, Lactobacillus delbrueckii, Lactobacillus salivarius, Lactobacillus buchneri, Treponema denticola, Microscilla marina, Burkholderiales bacterium, Polaromonas naphthalenivorans, Polaromonas sp., Crocosphaera watsonii, Cyanothece sp., Microcystis aeruginosa, Synechococcus sp., Acetohalobium arabaticum, Ammonifex degensii, Caldicelulosiruptor becscii, Candidatus Desulforudis, Clostridium botulinum, Clostridium difficile, Finegoldia magna, Natranaerobius thermophilus, Pelotomaculum thermopropionicum, Acidithiobacillus caldus, Acidithiobacillus ferrooxidans, Allochromatium vinosum, Marinobacter sp., Nitrosococcus halophilus, Nitrosococcus watsoni, Pseudoalteromonas haloplanktis, Ktedonobacter racemifer, Methanohalobium evestigatum, Anabaena variabilis, Nodularia spumigena, Nostoc sp., Arthrospira maxima, Arthrospira platensis, Arthrospira sp., Lyngbya sp., Microcoleus chthonoplastes, Oscillatoria sp., Petrotoga mobilis, Thermosipho africanus, Streptococcus pasteurianus, Neisseria cinerea, Campylobacter lari, Parvibaculum lavamentivorans, Corynebacterium diphtheria, Acidaminococcus sp., Lachnospiraceae bacterium ND2006, and Acaryochloris marina.

[0115] “Guide RNA”, “guide RNA”, and simply “guide” are used herein interchangeably to refer to either a crRNA (also known as CRISPR RNA), or the combination of a crRNA and a trRNA (also known as tracrRNA). The crRNA and trRNA may be associated as a single RNA molecule (single guide RNA, sgRNA) or in two separate RNA molecules (dual guide RNA, dgRNA). “Guide RNA” or “guide RNA” refers to each type. The trRNA may be a naturally-occurring sequence, or a trRNA sequence with modifications or variations compared to naturally-occurring sequences. For clarity, the terms “guide RNA” or “guide” as used herein, and unless specifically stated otherwise, may refer to an RNA molecule (comprising A, C, G, and U nucleotides) or to a DNA molecule encoding such an RNA molecule (comprising A, C, G, and T nucleotides) or complementary sequences thereof. In general, in the case of a DNA nucleic acid construct encoding a guide RNA, the U residues in any of the RNA sequences described herein may be replaced with T residues, and in the case of a guide RNA construct encoded by any of the DNA sequences described herein, the T residues may be replaced with U residues.

[0116] As used herein, a “spacer sequence,” sometimes also referred to herein and in the literature as a “spacer,” “protospacer,” “guide sequence,” or “targeting sequence” refers to a sequence within a guide RNA that is complementary to a target sequence and functions to direct a guide RNA to a target sequence for cleavage by a Cas9. A guide sequence can be 24, 23, 22, 21, 20 or fewer base pairs in length, e.g., in the case of Staphylococcus lugdunensis (i.e., SluCas9) or Staphylococcus aureus (i.e., SaCas9) and related Cas9 homologs/orthologs. In preferred embodiments, a guide/spacer sequence in the case of SluCas9 or SaCas9 is at least 20 base pairs in length, or more specifically, within 20-25 base pairs in length (see, e.g., Schmidt et al., 2021, Nature Communications, “Improved CRISPR genome editing using small highly active and specific engineered RNA-guided nucleases”). Shorter or longer sequences can also be used as guides, e.g., 15-, 16-, 17-, 18-, 19-, 20-, 21-, 22-, 23-, 24-, or 25-nucleotides in length. For example, in some embodiments, the guide sequence comprises at least 17, 18, 19, 20, 21, 22, 23, 24, or 25 contiguous nucleotides of a sequence selected from SEQ ID NOs: 1-35 (for SaCas9), and 100-225 (for SluCas9). In some embodiments, the target sequence is in a gene or on a chromosome, for example, and is complementary to the guide sequence. In some embodiments, the degree of complementarity or identity between a guide sequence and its corresponding target sequence may be about 75%, 80%, 85%, 90%, 95%, 96%, 97%, 98%, 99%, or 100%. In some embodiments, the guide sequence and the target region may be 100% complementary or identical. In other embodiments, the guide sequence and the target region may contain at least one mismatch. For example, the guide sequence and the target sequence may contain 1, 2, 3, or 4 mismatches, where the total length of the target sequence is at least 17, 18, 19, 20 or more base pairs. In some embodiments, the guide sequence and the target region may contain 1-4 mismatches where the guide sequence comprises at least 17, 18, 19, 20 or more nucleotides. In some embodiments, the guide sequence and the target region may contain 1, 2, 3, or 4 mismatches where the guide sequence comprises 20 nucleotides. In some embodiments, the guide sequence and the target region do not contain any mismatches.

[0117] As used herein, the terms “about” or “approximately” means an acceptable error for a particular value as determined by one of ordinary skill in the art, which depends in part on how the value is measured or determined.

[0118] As used herein, “AAV” refers to an adeno-associated virus vector. As used herein, “AAV” refers to any AAV serotype and variant, including but not limited to an AAV1, AAV2, AAV3, AAV4, AAV5, AAV6, AAV7, AAV8, AAVrh10 (see, e.g., SEQ ID NO: 81 of U.S. Pat. No. 9,790,472, which is incorporated by reference herein in its entirety), AAVrh74 (see, e.g., SEQ ID NO: 1 of US 2015/0111955, which is incorporated by reference herein in its entirety), AAV9 vector, AAV9P vector also known as AAVMYO (see, e.g., Weinmann et al., 2020, Nature Communications, 11:5432), and Myo-AAV vectors described in Tabebordbar et al., 2021, Cell, 184:1-20 (see, e.g., MyoAAV 1A, 2A, 3A, 4A, 4C, or 4E), wherein the number following AAV indicates the AAV serotype. The term “AAV” can also refer to any known AAV (vector) system. In some embodiments, the AAV vector is a single-stranded AAV (ssAAV). In some embodiments, the AAV vector is a double-stranded AAV (dsAAV). Any variant of an AAV vector or serotype thereof, such as a self-complementary AAV (scAAV) vector, is encompassed within the general terms AAV vector, AAV1 vector, etc. See, e.g., McCarty et al., Gene Ther. 2001; 8:1248-54, Naso et al., BioDrugs 2017; 31:317-334, and references cited therein for detailed discussion of various AAV vectors. Structurally, AAVs are small (25 nm), single-DNA stranded non-enveloped viruses with an icosahedral capsid. As used herein, “AAV” can refer to naturally occurring or engineered AAV serotypes and recombinant AAVs (rAAVs) and variants that can differ in the composition and structure of their capsid protein have varying tropism, i.e., ability to transduce different cell types. When combined with active promoters, this tropism defines the site of gene expression.

[0119] As used herein “AAV-based gene therapy” refers to the administration of AAV vector(s) and use of any AAV or AAV (vector) system comprising a tissue-specific promoter in facilitating administration of gene therapy, which can include any known gene editing system in the art. A promoter as described herein can also be “cell specific,” meaning that the particular promoter selected for the AAV can direct expression of the selected transgene/nucleotide sequence of interest in a particular cell or cell type. In some embodiments, for example, the promoter is a muscle-specific promoter, including a muscle creatine kinase promoter, a desmin promoter, an MHCK7 promoter, or an SPc5-12 promoter. In some embodiments, the muscle-specific promoter is a CK8 promoter. In some embodiments, the muscle-specific promoter is a CK8e promoter. Muscle-specific promoters are described in detail, e.g., in US2004/0175727 A1; Wang et al., Expert Opin Drug Deliv. (2014) 11, 345-364; Wang et al., Gene Therapy (2008) 15, 1489-1499. In some embodiments, the tissue-specific promoter is a neuron-specific promoter, such as an enolase promoter. See, e.g., Naso et al., BioDrugs 2017; 31:317-334; Dashkoff et al., Mol Ther Methods Clin Dev. 2016; 3:16081, and references cited therein for detailed discussion of tissue-specific promoters including neuron-specific promoters. Any known promoters may be used in conjunction with the AAVs to administer the gene therapy to the intended target tissues or cells. As used herein, “non-liver AAV-based gene therapy” includes treating or preventing a disease or disorder using AAV-based gene therapy that is not a disease or disorder of the liver.

[0120] As used herein, “AAVR” or “AAV-R” or “AAV receptor” are used interchangeably to refer to AAV receptor protein. Synonyms for AAVR also include, FLJ44532, KIAA0319L, KIAA0319-like, KIAA1837, KIAA1837 dyslexia-associated protein, KIAA0319-like protein, and polycystic kidney disease 1-related. AAVR is a glycosylated membrane protein that is capable of recycling from the plasma membrane to the trans-Golgi network using the cellular endosomal network. AAVR is known to be the key receptor that mediates entry of a panel of AAV serotypes. See, e.g., Pillay, Nature, 530(7588): 108-112 (2016); Meyer et al., eLife 8:e44707. DOI: doi.org/10.7554/eLife.44707 (2019). AAVR knock out was found to render cells highly resistant to infection by AAV2; and where AAVR is overexpressed in cells, the cells were increasingly susceptible to AAV2 infection. In Pillay (2016), CRISPR/Cas9 genome engineering was used to generate isogenic AAVR knock-out cell lines in a panel of cell types representing human and murine tissues. AAVR knock-out cells were infected with a panel of various AAV serotypes including AAV1, 2, 3B, 5, 6, 8, and 9, where the knock-out cells seemed resistant to all AAV serotypes. Accordingly, multiple serotypes, including AAV1, AAV2, AAV3B, AAV5, AAV6, AAV8, and AAV9, require AAVR for transduction. In some embodiments, “AAV” refers to any AAV serotype and variant.

[0121] As used herein, “blocks AAV binding to an AAVR” or the like, means temporarily or permanently reducing, inhibiting, or blocking the ability of an AAV to bind to an AAVR. In some embodiments, “blocking” means downregulating gene expression of an AAVR such that less AAVR is expressed on a cell treated with a “blocking” agent (e.g., AAVR-specific siRNA or ASO) as compared to a control cell of the same cell type that is not treated with the “blocking” agent. In some embodiments, “blocking” means contacting the AAVR with an agent (e.g., an antibody or small molecule) that prohibits the binding of an AAV to the AAVR.

[0122] As used herein, “RNAi compound,” “RNAi molecule,” or “RNAi” are used interchangeably and refer to inhibitory RNA. RNAi refers to an antisense compound that acts to modulate a target nucleic acid and/or protein encoded by a target nucleic acid. RNAi compounds include but are not limited to small interfering RNA (siRNA), single-stranded RNA (ssRNA), microRNA, including microRNA mimics, double-stranded RNA (dsRNA), short hairpin RNA (shRNA), and expression cassettes encoding RNA capable of inducing RNA interference. For example, RNAi expression cassettes can be transcribed in cells to produce siRNA, separate sense and anti-sense strand linear siRNA, or small hairpin RNAs that can function as miRNAs. As used herein, referencing “RNAi” and “siRNA” refers to the terms as used in the broadest sense and encompasses, for example, any siRNA that has been modified (e.g., chemical modification, attachment of at least one receptor-binding ligand or moiety) so long as the molecule retains the ability to bind to target nucleic acids in target cells, thereby reducing the target gene's expression. RNAi molecules are readily designed and generated by techniques known in the art.

[0123] As used herein, “antisense oligonucleotides” or “ASOs” refer to short strands of DNA or RNA that bind to a complementary RNA sequence, thereby inhibiting its function. ASOs can effectively downregulate or upregulate the production of certain downstream proteins downstream by inhibiting specific RNA sequences, and can theoretically be used with both select loss of function and gain of function mutations.

[0124] As used herein, “liver targeting moiety” includes, but is not limited to, any ligand or conjugate that can be applied to an agent that blocks AAV binding to AAVR (e.g., siRNA, RNAi, or an anti-AAVR antibody) to enhance the agent's delivery and/or uptake by the liver, including any known liver-targeting conjugates, including, N-acetylgalactosamine (GalNAc) conjugates, and any other delivery system for liver or hepatic delivery of the agent (e.g., siRNA or RNAi). The selection of an appropriate ligand or conjugate for targeting siRNAs to particular body systems, organs, tissues or cells is considered to be within the ordinary skill of the art. For example, to target an siRNA to hepatocytes, cholesterol may be attached at one or more ends, including any combination of 5′- and 3′-ends, of an siRNA molecule. The resultant cholesterol-siRNA is delivered to hepatocytes in the liver, thereby providing a means to deliver siRNAs to this targeted location. Other ligands useful for targeting siRNAs to the liver include HBV surface antigen and low-density lipoprotein (LDL).

[0125] As used herein, “LNP” or “lipid nanoparticle” refers to a lipid-based delivery composition. LNPs are known in the art and refer to particles that comprises a plurality of (i.e., more than one) lipid molecules physically associated with each other by intermolecular forces. The LNPs may be, e.g., microspheres (including unilamellar and multilamellar vesicles, e.g., “liposomes”-lamellar phase lipid bilayers that, in some embodiments, are substantially spherical—and, in more particular embodiments, can comprise an aqueous core, e.g., comprising a substantial portion of RNA molecules), a dispersed phase in an emulsion, micelles, or an internal phase in a suspension. Emulsions, micelles, and suspensions may be suitable compositions for local and/or topical delivery. See also, e.g., WO2017173054A1, the contents of which are hereby incorporated by reference in their entirety. Any LNP known to those of skill in the art to be capable of delivering nucleotides, including siRNA or other RNAi, to subjects can be used herein.

[0126] As used herein, “antibody” is used in the broadest sense and encompasses various antibody structures, including but not limited to monoclonal antibodies, polyclonal antibodies, multispecific antibodies (e.g., bispecific antibodies), nanobodies, and antibody or antigen-binding fragments so long as they exhibit the desired antigen-binding activity. As used herein, “anti-AAVR antibody” refers to an antibody (as used in the broadest sense as set forth above) that blocks an interaction between AAVR and AAV.

[0127] The terms “composition” or “formulation” refer to a preparation which is in such form as to permit the biological activity of an active ingredient contained therein to be effective, and which contains no additional components which are unacceptably toxic to a subject to which the composition would be administered.

[0128] The terms “pharmaceutically acceptable carrier” or “pharmaceutically acceptable vehicle” refer to any diluent, adjuvant, excipient, or combinations thereof, in a pharmaceutical composition which allows, for example, facilitation of the administration of the active ingredient contained therein. Non-limiting examples of substances that can generally serve as pharmaceutically acceptable carriers include oils, glycols; polyols, such as glycerin, sorbitol, mannitol, and polyethylene glycol; esters; agar; buffering agents; water; isotonic saline solution; Ringer's solution; ethyl alcohol; pH buffer solution; and any other non-toxic compatible materials used in pharmaceutical preparations. Such carriers or vehicles should be non-toxic and should not substantially interfere with the efficacy of the active ingredient. Pharmaceutically acceptable carriers are well known and will be adapted by the person skilled in the art as a function of the nature, route, and mode of administration.

[0129] As used herein, “treatment” (and variations thereof such as “treat” or “treating”) refers to any administration or application of a therapeutic for disease or disorder in a subject, and includes inhibiting the disease or development of the disease (which may occur before or after the disease is formally diagnosed, e.g., in cases where a subject has a genotype that has the potential or is likely to result in development of the disease), arresting its development, relieving one or more symptoms of the disease, curing the disease, or preventing reoccurrence of one or more symptoms of the disease. As used herein, “treatment” can include administrating a therapeutic or therapeutic regimen including optional adjuvant or pre-conditioning regimen to achieve a therapeutic or prophylactic benefit. As used herein, “treatment” also encompasses “ameliorating,” which refers to any beneficial effect on a phenotype or symptom, such as reducing its severity, slowing or delaying its development, arresting its development, or partially or completely reversing or eliminating it.

[0130] “Pre-conditioning,” “preconditioning,” or “conditioning” are used interchangeably herein and refer to the preparation of the subject in need of the non-liver AAV-based gene therapy for a suitable condition, which includes blocking AAV binding to AAV receptors in the liver prior to the subject receiving the AAV-based gene therapy.

[0131] As used herein, the term “administering” refers to the physical introduction of an agent to a subject, using any of the various methods and delivery systems known to those skilled in the art. Exemplary routes of administration for the agents disclosed herein include intravenous, intramuscular, subcutaneous, intraperitoneal, spinal or other parenteral routes of administration, for example by injection or infusion. The phrase “parenteral administration” as used herein means modes of administration other than enteral and topical administration, usually by injection, and includes, without limitation, intravenous, intramuscular, intraarterial, intrathecal, intralymphatic, intralesional, intracapsular, intraorbital, intracardiac, intradermal, intraperitoneal, transtracheal, subcutaneous, subcuticular, intraarticular, subcapsular, subarachnoid, intraspinal, epidural and intrasternal injection and infusion, as well as in vivo electroporation. In some embodiments, the agents disclosed herein may be administered via a non-parenteral route, e.g., orally. Other non-parenteral routes include a topical, epidermal, or mucosal route of administration, for example, intranasally, vaginally, rectally, sublingually or topically. The phrase “systemic injection” as used herein non-exclusively relates to intravenous, intraperitoneally, subcutaneous, via nasal submucosa, lingual, via bronchoscopy, intravenous, intra-arterial, intra-muscular, intro-ocular, intra-striatal, subcutaneous, intradermal, by dermal patch, by skin patch, by patch, into the cerebrospinal fluid, into the portal vein, into the brain, into the lymphatic system, intra-pleural, retro-orbital, intra-dermal, into the spleen, intra-lymphatic, among others. “Co-administration,” as used herein, means that a plurality of substances are administered sufficiently close together in time so that the agents act together. Co-administration encompasses administering substances together in a single formulation and administering substances in separate formulations close enough in time so that the agents act together.

[0132] As used herein, “subject” may be a mammal, such as a primate, ungulate (e.g., cow, pig, horse), cat, dog, domestic pet or domesticated mammal. In some cases, the mammal may be a rabbit, pig, horse, sheep, cow, cat or dog, or a human. In some embodiments, the subject is a human. In some embodiments, the subject is an adult human. In some embodiments, the subject is a juvenile human. In some embodiments, the subject is greater than about 18 years old, greater than about 25 years old, or greater than about 35 years old. In some embodiments, the subject is less than about 18 years old, less than about 16 years old, less than about 14 years old, less than about 12 years old, less than about 10 years old, less than about 8 years old, less than about 6 years old, less than about 5 years old, less than about 4 years old, less than about 3 years old, less than about 2 years old, less than about 1 year old, or less than about 6 months old.

[0133] As used herein, “knock down,” “knockdown,” or the like refers suppression of the expression of a gene product, such as, for example, suppression achieved by the use of antisense oligo deoxynucleotides and RNAi that specifically target the RNA product of the gene. Gene knockdown refers to techniques by which the expression of one or more of an organism's genes is reduced, either through genetic modification (a change in the DNA of one of the organism's chromosomes) or by treatment with a reagent such as a short DNA or RNA oligonucleotide with a sequence complementary to either an mRNA transcript or a gene. “Knock down” includes partial and complete suppression.

### II. Compositions

[0134] Disclosed herein are compositions comprising agents to block and/or that are useful for blocking AAV binding to AAVR receptors. In some embodiments, the compositions comprise a delivery molecule that targets the liver (e.g., hepatocytes). In some embodiments, the composition comprises an agent that blocks AAV binding to an AAV receptor (AAVR) and a delivery molecule that delivers the agent to the liver.

[0135] In some embodiments, the compositions and agents are capable of temporarily blocking AAV binding to AAVR receptors in the liver, including for about 48 hours to 3 weeks. In some embodiments, the compositions and agents are capable of blocking AAV binding to AAVR receptors in the liver for about 2 days, about 3 days, about 4 days, about 5 days, about 6 days, about 7 days, about 8 days, about 9 days, about 10 days, about 11 days, about 12 days, about 13 days, about 14 days, about 15 days, about 16, days, about 17 days, about 18 days, about 19 days, about 20 days, or about 21 days. In some embodiments, the compositions are capable of blocking AAV binding to AAVR receptors in the liver for about 7 days, about 8 days, about 9 days, about 10 days, about 11 days, about 12 days, about 13 days, about 14 days. In some embodiments, the compositions and agents are capable of blocking AAV binding to AAVR receptors in the liver for 1-7, 1-10, 1-28 days, 7-28 days, 14-28 days, 21-28 days, 1-21 days, 7-21 days, 14-21 days, 1-14 days, 7-14 days, or 1-7 days.

[0136] In some embodiments, the compositions and agents are capable of long-term blocking AAV binding to AAVR receptors in the liver, including for longer than about 3 weeks, longer than about 4 weeks, longer than about 5 weeks, longer than about 6 weeks, longer than about 7 weeks, longer than about 8 weeks, longer than about 9 weeks, and longer than about 10 weeks. In some embodiments, the compositions and agents are capable of long-term blocking AAV binding to AAVR receptors in the liver, including for longer than 10 weeks.

A. RNAi and siRNA

[0137] In some embodiments, RNAi is the agent used to block AAV binding to AAVR in the liver. RNA interference refers to sequence- or gene-specific suppression of gene expression (protein synthesis) mediated by RNAi/siRNA in an organism without generally suppressing other protein synthesis. RNAi induce RNA interference through interaction with the RNA interference pathway method of mammalian cells in order to degrade or inhibit the translation of messenger RNA (mRNA) transcripts of transgene in a sequence-specific manner. RNAi activity directed toward major receptor proteins can lead to decreased entry into or binding to those cells. RNAi includes the use of small interfering RNA (siRNA) to target particular sequences in cells. RNAi polynucleotides include siRNA, microRNA (miRNA), double-stranded RNA (dsRNA), short hairpin RNA (shRNA), and expression cassettes encoding RNA capable of inducing RNA interference.

[0138] In some embodiments, the agent that blocks AAV binding to an AAV receptor (AAVR) is small-interfering RNA (siRNA). Small interfering RNA (siRNA) are known for their ability to specifically interfere with protein expression in a target. siRNAs are designed to interact with a target ribonucleotide sequence, meaning they complement a target sequence sufficiently to bind to the target sequence. siRNAs generally contain 15-50 base pairs, preferably 21-25 base pairs, and are used to encode a sequence of a target gene or RNA expressed in a cell, with a nucleotide sequence identity (fully complementary) or a nearly double identity (partial complementarity). They have also been used to knock down AAVR expression in Huh-7 cells by treatment with siRNA specific for AAVR. In a study assessing the ability of ImmTOR to restore transduction of Huh-7 cells transfected with AAVR-specific siRNA, it was found that Huh-7 cells expressing approximately 20% of normal AAVR showed a 50% reduction in AAVAnc80-luciferase expression when treated with the siRNA. See Ilyinskii et al., Sci. Adv., 7 eabd0321 (2021). It has also been reported that systematically or locally delivered siRNA can induce a temporary gene expression knockdown effect by up to 90% from 48 hours to 3 weeks in animal experiments for eyes, brain, spinal cord, lungs, subcutaneous tissue, vagina, skin, isolated tumor, heart et al. See Kim, Korean J Anesthesiol. 59(6): 369-370 (2010). Accordingly, in some embodiments, siRNA specific for AAVR is used to block AAV binding to AAVR in the liver. In some embodiments, the agent that blocks AAV binding to an AAV receptor (AAVR) is a small-interfering RNA (siRNA). In some embodiments, the subject has not been administered a reagent that enhances targeting to the liver (e.g., ImmTOR) in conjunction with the AAV-based gene therapy.

[0139] In other contexts, siRNA can be considered to have limited use because of the transient nature of the suppression effect seen in cells where the siRNA has been administered. Additionally, siRNAs are known to be unstable in vivo with limited long-term effectiveness. In some embodiments herein, the composition comprises a siRNA and the disclosure contemplates utilization of this temporal trait that is often viewed as a detriment in different context.

[0140] In some embodiments, the administration of any of the RNAi molecules disclosed herein or a composition thereof is capable of temporarily blocking AAV binding to AAVR receptors, e.g., in the liver, including for about 48 hours to 3 weeks. In some embodiments, the RNAi molecules and/or compositions are capable of blocking AAV binding to AAVR receptors, e.g., in the liver for about 2 days, about 3 days, about 4 days, about 5 days, about 6 days, about 7 days, about 8 days, about 9 days, about 10 days, about 11 days, about 12 days, about 13 days, about 14 days, about 15 days, about 16, days, about 17 days, about 18 days, about 19 days, about 20 days, or about 21 days. In some embodiments, the RNAi molecules and/or compositions are capable of blocking AAV binding to AAVR receptors, e.g., in the liver for about 7 days, about 8 days, about 9 days, about 10 days, about 11 days, about 12 days, about 13 days, about 14 days. In some embodiments, the RNAi molecules and/or compositions are capable of blocking AAV binding to AAVR receptors, e.g., in the liver for 1-7, 1-10, 1-28 days, 7-28 days, 14-28 days, 21-28 days, 1-21 days, 7-21 days, 14-21 days, 1-14 days, 7-14 days, or 1-7 days.

[0141] In some embodiments, any of the RNAi molecules disclosed herein targets an AAVR-encoding transcript. In some embodiments, the AAVR-encoding transcript comprises a sequence that is at least 80%, 85%, 90%, 91%, 92%, 93%, 94%, 95%, 96%, 97%, 98%, 99% or 100% identical to the sequence of SEQ ID NO: 300, or a reverse complement thereof. In some embodiments, the RNAi molecule targets 19, 20, 21, 22, 23, 24, 25, 26, 27, 28, 29, 30, 31 or 32 contiguous nucleotides of a sequence that is at least 80%, 85%, 90%, 91%, 92%, 93%, 94%, 95%, 96%, 97%, 98%, 99% or 100% identical to the sequence of SEQ ID NO: 300, or a reverse complement thereof. In some embodiments, the RNAi molecule targets 19-32, 19-25, 19-22, or 20-21 contiguous nucleotides of a sequence that is at least 80%, 85%, 90%, 91%, 92%, 93%, 94%, 95%, 96%, 97%, 98%, 99% or 100% identical to the sequence of SEQ ID NO: 300, or a reverse complement thereof

SEQ ID NO: 300:
GTTTCCGGCCGCCGTCGCTGTCCAGGGAGGCTGAGGCGAGAGGTAG
CTGTCCGGGTGGGGAGCCCGCACTACCTTCTTCCTCTTCCTCCTC
CTCCTCCGGGTGAGGGGAGCGAAGGTTGGGGGTCCCCGAGCCCAT
GGACCAGGAGGAGGCGGAGGCCGCCGAGAGCCGGGGCCCCGCTAT
GTGGCCCTGAGCCCCGTGTACTGGTTCTGCCTGTCTGGAGGGCCA
TGGAGAAGAGGCTGGGAGTCAAGCCAAATCCTGCTTCCTGGATTT
TATCAGGATATTATTGGCAGACATCTGCGAAGTGGTTGAGAAGCC
TGTACCTGTTTTATACTTGCTTTTGCTTCAGCGTTCTGTGGTTGT
CAACAGATGCCAGTGAGAGCAGGTGCCAGCAGGGGAAGACACAAT
TTGGAGTTGGCCTGAGATCTGGGGGAGAAAATCACCTCTGGCTTC
TTGAAGGAACCCCCTCTCTCCAGTCATGTTGGGCTGCCTGCTGCC
AGGACTCTGCCTGCCATGTCTTTTGGTGGCTAGAAGGGATGTGCA
TTCAGGCAGACTGCAGCAGGCCCCAGAGCTGCCGGGCTTTTAGGA
CACACTCCTCCAATTCCATGCTGGTGTTTTTAAAAAAATTCCAAA
CTGCAGATGATTTGGGCTTTCTACCTGAAGATGATGTACCACATC
TTCTGGGGCTAGGTTGGAACTGGGCATCTTGGAGGCAGAGCCCAC
CCAGAGCTGCACTCAGACCTGCTGTATCTTCCAGTGACCAGCAGA
GCTTAATCAGGAAGCTTCAGAAGAGAGGTAGTCCCAGTGACGTAG
TTACACCTATAGTGACACAGCATTCTAAAGTGAATGACTCCAACG
AATTAGGTGGTCTGACTACCAGTGGCTCTGCAGAGGTCCACAAGG
CGATTACAATTTCCAGTCCCCTAACCACAGACCTGACTGCAGAGC
TGTCTGGTGGGCCAAAGAATGTATCAGTGCAACCTGAAATATCAG
AGGGTCTTGCTACTACGCCCAGCACTCAACAAGTAAAAAGTTCTG
AGAAAACCCAGATTGCTGTCCCCCAGCCAGTGGCTCCCTCCTACA
GTTATGCTACCCCTACCCCCCAGGCCTCTTTCCAGAGCACCTCAG
CACCATACCCAGTTATAAAGGAACTGGTGGTATCTGCTGGAGAGA
GTGTCCAGATAACCCTGCCTAAGAATGAAGTTCAATTAAATGCAT
ATGTTCTCCAAGAACCACCTAAAGGAGAAACCTACACCTACGACT
GGCAGCTGATTACTCATCCTAGAGACTACAGTGGAGAAATGGAAG
GGAAACATTCCCAGATCCTCAAACTATCGAAGCTCACTCCAGGCC
TGTATGAATTCAAAGTGATTGTAGAGGGTCAAAATGCCCATGGGG
AAGGCTATGTGAACGTGACAGTCAAGCCAGAGCCCCGTAAGAATC
GGCCCCCCATTGCTATTGTGTCACCTCAGTTCCAGGAGATCTCTT
TGCCAACCACTTCTACAGTCATTGATGGCAGTCAAAGCACTGATG
ATGATAAAATCGTTCAGTACCATTGGGAAGAACTTAAGGGGCCTC
TAAGAGAAGAGAAGATTTCTGAAGATACAGCCATATTAAAACTAA
GTAAACTCGTCCCTGGGAACTACACTTTCAGCTTGACTGTAGTAG
ACTCTGATGGAGCTACCAACTCTACTACTGCAAACCTGACAGTGA
ACAAAGCTGTGGATTACCCCCCTGTGGCCAACGCAGGCCCCAACC
AAGTGATCACCCTGCCCCAAAACTCCATCACCCTCTTTGGGAACC
AGAGCACTGATGATCATGGCATCACCAGCTATGAGTGGTCACTCA
GCCCAAGCAGCAAAGGGAAAGTGGTGGAGATGCAGGGTGTTAGAA
CACCAACCTTACAGCTCTCTGCGATGCAAGAAGGAGACTACACTT
ACCAGCTCACAGTGACTGACACAATAGGACAGCAGGCCACTGCTC
AAGTGACTGTTATTGTGCAACCTGAAAACAATAAGCCTCCTCAGG
CAGATGCAGGCCCAGATAAAGAGCTGACCCTTCCTGTGGATAGCA
CAACCCTGGATGGCAGCAAGAGCTCAGATGATCAGAAAATTATCT
CATATCTCTGGGAAAAAACACAGGGACCTGATGGGGTGCAGCTCG
AGAATGCTAACAGCAGTGTTGCTACTGTGACTGGGCTGCAAGTGG
GGACCTATGTGTTCACCTTGACTGTCAAAGATGAGAGGAACCTGC
AAAGCCAGAGCTCTGTGAATGTCATTGTCAAAGAAGAAATAAACA
AACCACCTATAGCCAAGATAACTGGGAATGTGGTGATTACCCTAC
CCACGAGCACAGCAGAGCTGGATGGCTCTAAGTCCTCAGATGACA
AGGGAATAGTCAGCTACCTCTGGACTCGAGATGAGGGGAGCCCAG
CAGCAGGGGAGGTGTTAAATCACTCTGACCATCACCCTATCCTTT
TTCTTTCAAACCTGGTTGAGGGAACCTACACTTTTCACCTGAAAG
TGACCGATGCAAAGGGTGAGAGTGACACAGACCGGACCACTGTGG
AGGTGAAACCTGATCCCAGGAAAAACAACCTGGTGGAGATCATCT
TGGATATCAACGTCAGTCAGCTAACTGAGAGGCTGAAGGGGATGT
TCATCCGCCAGATTGGGGTCCTCCTGGGGGTGCTGGATTCCGACA
TCATTGTGCAAAAGATTCAGCCGTACACGGAGCAGAGCACCAAAA
TGGTATTTTTTGTTCAAAACGAGCCTCCCCACCAGATCTTCAAAG
GCCATGAGGTGGCAGCGATGCTCAAGAGTGAGCTGCGGAAGCAAA
AGGCAGACTTTTTGATATTCAGAGCCTTGGAAGTCAACACTGTCA
CATGTCAGCTGAACTGTTCCGACCATGGCCACTGTGACTCGTTCA
CCAAACGCTGTATCTGTGACCCTTTTTGGATGGAGAATTTCATCA
AGGTGCAGCTGAGGGATGGAGACAGCAACTGTGAGTGGAGCGTGT
TATATGTTATCATTGCTACCTTTGTCATTGTTGTTGCCTTGGGAA
TCCTGTCTTGGACTGTGATCTGTTGTTGTAAGAGGCAAAAAGGAA
AACCCAAGAGGAAAAGCAAGTACAAGATCCTGGATGCCACGGATC
AGGAAAGCCTGGAGCTGAAGCCAACCTCCCGAGCAGGCATCAAAC
AGAAAGGCCTTTTGCTAAGTAGCAGCCTGATGCACTCCGAGTCAG
AGCTGGACAGCGATGATGCCATCTTTACATGGCCAGACCGAGAGA
AGGGCAAACTCCTGCATGGTCAGAATGGCTCTGTACCCAACGGGC
AGACCCCTCTGAAGGCCAGGAGCCCGCGGGAGGAGATCCTGTAGC
CACCTGGTCTGTCTCCTCAGGGCAGGGCCCAGCACACTGCCCGGC
CAGTCCTCCTACCTCCCGAGTCTGCGGGCAGCTGCTGTCCCAGCA
TCTGCTGGTCATTTCGCCCTGACAGTCCCAACCAGAACCCCTGGG
ACTTGAATCCAGAGACGTCCTCCAGGAACCCCTCAACGAAGCTGT
GAATGAAGAGGTTTCCTCTTTAAACCTGTCTGGTGGGCCCCCAGA
TATCCTCACCTCAGGGCCTCCTTTTTTTGCAAACTCCTCCCCTCC
CCCGAGGGCAGACCCAGCCAGCTGCTAAGCTCTGCAGCTCCCCAG
TGGACAGTGTCATTGTGCCCAGAGTGCTGCAAGGTGAGGCCTGCT
GTGCTGCCCGCACACCTGAGTGCAAAACCAAGCACTGTGGGCATG
GTGTTTCCCTCTCTGGGGTAGAGTACGCCCTCTCGCTGGGCAAAG
AGGAAGTGGCACCCCTCCCCTCACCACAGATGCTGAGATGGTAGC
ATAGAAATGATGGCCGGGCGCGGTGGCTCACGCCTGTAATCCCAG
CACTTTGGGAGGCCGAGGCGGGCGGATCATGAGGTCAGGAGATCA
AGACCACCCTGGCTAACACGGTGAAACCCCATCTCTACTAAAAAT
AAAAAAAAAAATTAGCCGGGTTTGGTGGCGTATGCCTGTAATCCC
AGCTACTCGGGAGGCTGAGGCAGGAGAATTGCTTAAACCTGGGAG
GTGGAGGCTGCAGTGAGCCAAGATCGTGCCACTGCACTCCAGCCT
GAGTGACAGAGCAAGACTCCGTCAAAAAAAAAAAAAAAAAAAAAG
AAATGATATCTGGCCCCCCCTTAACACTGGAGCCCCACTCCCTTC
TCCCATCCGGCCCGAGATTAGGGAGGATTGACTGTGTCAGGGATG
GCGGGTGGCCTCTCTCGCTGCCAGGGCCCTTGTCAGAGCAGCCAG
GCTGGACAGACGGCCTCCCTCCTCTCCATCTGACCGGCACCTGCT
GCTTCGGGGCTTAGGCCACCGCTCCCTGTCCCCAGAGGAGATAGC
CCCAGATGGACTGGAATGTTGTGGCATGAGAGCGCATGTGTGCGA
TGGCCCCGCTGTGGTCCCCTCTCTGTCCCTCCATCTGTATGTGTT
CTGTGTCCCTTGCATGTGTGCGTGTTAGAGTGAGCGCGTATGCAT
CAACTCATTGGGCTCTTGGCTGCTCACAAGGCAAATTTGACTTGG
AAAGACTTTCATCTCCTTGGAACCAAGACTTCCTGAGTCCCCCTC
ACCCTGGCCCTGTTCCACCATGGTTATCTGGGTATTGGGGAATGG
AAACTTTGGGGGAGTGACTTTTTAAAGAGACACTTATAATTTCTA
CTACTGCACTACTGTCCATTGTGGGATGATTAAACATGGTATTTA
ACTGTG.

[0142] In some embodiments, the composition comprises an RNAi (e.g., siRNA) where the administration of the composition is capable of knocking down AAVR. In some embodiments, the RNAi (e.g., siRNA) comprises a ribonucleotide sequence at least 80% identical to a ribonucleotide sequence from the AAVR. Preferably, the RNAi (e.g., siRNA) molecule is at least 90%, 95%, 96%, 97%, 98%, 99% or 100% identical to the ribonucleotide sequence of the target. Most preferably, an RNAi (e.g., siRNA) will be 100% identical to the nucleotide sequence ofthe target. However, siRNA molecules with insertions, deletions or single point mutations relative to a target may also be effective. In some embodiments, the RNAi (e.g., siRNA) targets AAVR in the liver. In some embodiments, the RNAi is siRNA. Tools to assist siRNA design are readily available to the public and are known in the art.

[0143] In some embodiments, the composition comprises an RNAi molecule that is between 18-31 nucleotides in length. In some embodiments, the RNAi (e.g., siRNA) is between 19-27 nucleotides in length. In some embodiments, the RNAi (e.g., siRNA) is between 19-25 nucleotides in length. In some embodiments, the RNAi (e.g., siRNA) is between 19-23 nucleotides in length. In some embodiments, the RNAi (e.g., siRNA) is between 19-21 nucleotides in length. In some embodiments, the RNAi (e.g., siRNA) is no more than 21, 25, or 31 nucleotides in length. In some embodiments, the RNAi (e.g., siRNA) is 21 nucleotides in length. In some embodiments, the RNAi is siRNA and comprises the sequence of any of the sequences in Table 3 (SEQ ID NOs: 4300-9507). In some embodiments, the siRNA comprises no more than and no fewer than 19 contiguous nucleotides of any of the sequences in Table 3. In some embodiments, the siRNA comprises no more than and no fewer than 20 contiguous nucleotides of any of the sequences in Table 3.

[0144] SEQ ID NOs: 4300-9507 in Table 3 reflect exemplary sequences for the antisense 5′ to 3′ strand of siRNA.

[0145] Sequences for 19-mer and 21-mer strands of siRNA with modifications that were used in the examples are set forth in Table A1, A2, and A3 below. In Table A2 (modified sequences), the “dT” denotes a DNA base instead ofan RNA base. Lower case letters in the sequences denote 2′OMe bases. Capital letters denote regular RNA bases. The “s” toward the 3′ end of the sense and antisense sequences denote the bond between the two bases in the siRNA sequence is a phosphorothioate bond. FIG. 1K shows a representative structure for the modified siRNA sequence.

TABLE A1
Exemplary siRNA sequences

| | | siRNA sense | | siRNA |
|---|---|---|---|---|
| | | strand | | antisense |
| | | core | | strand core |
| | SEQ | sequence | SEQ | sequence |
| | ID | (5′-3′) | ID | (5′-3′) |
| Duplex ID | NO: | 19 mer | NO: | 21 mer |
| XD-51567 | 9508 | GGUACUCCGC | 9509 | UUUUUACUUG |
| | | AAGUAAAAA | | CGGAGUACCA |
| | | | | G |
| XD-51568 | 9510 | CACUCAUCCU | 9511 | UUAGUCUGUA |
| | | ACAGACUAA | | GGAUGAGUGA |
| | | | | U |
| XD-51569 | 9512 | GCUUAACUGU | 9513 | UAGUCGACAA |
| | | UGUCGACUA | | CAGUUAAGCU |
| | | | | G |
| XD-51570 | 9514 | ACCUUGACUG | 9515 | UAUCUUUGAC |
| | | UCAAAGAUA | | AGUCAAGGUG |
| | | | | A |
| XD-51571 | 9516 | CCUACACGUU | 9517 | UUCAGGUGAA |
| | | UCACCUGAA | | ACGUGUAGGU |
| | | | | C |
| XD-51572 | 9518 | GGUGCUGGAU | 9519 | UAUGUCGGAA |
| | | UCCGACAUA | | UCCAGCACCC |
| | | | | C |
| XD-51573 | 9520 | CUGGAUUCCG | 9521 | UAAUGAUGUC |
| | | ACAUCAUUA | | GGAAUCCAGC |
| | | | | A |
| XD-51574 | 9522 | GCAAAAGAUU | 9523 | UUACGGCUGA |
| | | CAGCCGUAA | | AUCUUUUGCA |
| | | | | C |
| XD-51575 | 9524 | CAAAAGAUUC | 9525 | UGUACGGCUG |
| | | AGCCGUACA | | AAUCUUUUGC |
| | | | | A |
| XD-51576 | 9526 | CUGAUGCAUU | 9527 | UCGAUUCAGA |
| | | CUGAAUCGA | | AUGCAUCAGG |
| | | | | C |
| Unmodified | 9528 | GCGUUCUGUG | 9529 | GUUGACAACC |
| SIRNA | | GUUGUCAACA | | ACAGAACGCU |
| | | G | | G |
| Fluc | 9530 | CUUACGCUGA | 9531 | UCGAAGUACU |
| control | | GUACUUCGA | | CAGCGUAAGU |
| | | | | U |

TABLE A2
Modified siRNA sequences

| | | | | siRNA |
|---|---|---|---|---|
| | | siRNA sense | | antisense |
| | | strand | | strand |
| | | sequence | | sequence |
| | | (5′-3′) | | (5′-3′) |
| | SEQ | 19 mer | SEQ | 21 mer |
| | ID | with | ID | with |
| Duplex ID | NO: | modifications | NO: | modifications |
| XD-51567 | 9532 | ggUacuCCGc | 9533 | dTUUUUACUU |
| | | aAguaaAasa | | GCGgAGUACC |
| | | | | asg |
| XD-51568 | 9534 | caCucaUCCu | 9535 | dTUAGUCUGU |
| | | aCagacUasa | | AGGaUGAGUG |
| | | | | asu |
| XD-51569 | 9536 | gcUuaaCUGu | 9537 | dTAGUCGACA |
| | | uGucgaCusa | | ACAgUUAAGC |
| | | | | usg |
| XD-51570 | 9538 | acCuugACUg | 9539 | dTAUCUUUGA |
| | | uCaaagAusa | | CAGuCAAGGU |
| | | | | gsa |
| XD-51571 | 9540 | ccUacaCGUu | 9541 | dTUCAGGUGA |
| | | uCaccuGasa | | AACgUGUAGG |
| | | | | usc |
| XD-51572 | 9542 | ggUgcuGGAu | 9543 | dTAUGUCGGA |
| | | uCcgacAusa | | AUCCAGCACC |
| | | | | esc |
| XD-51573 | 9544 | cuGgauUCCg | 9545 | dTAAUGAUGU |
| | | aCaucaUusa | | CGGaAUCCAG |
| | | | | csa |
| XD-51574 | 9546 | gcAaaaGAUu | 9547 | dTUACGGCUG |
| | | cAgccgUasa | | AAUCUUUUGC |
| | | | | asc |
| XD-51575 | 9548 | caAaagAUUc | 9549 | dTGUACGGCU |
| | | aGccguAcsa | | GAAuCUUUUG |
| | | | | csa |
| XD-51576 | 9550 | cuGaugCAUu | 9551 | dTCGAUUCAG |
| | | cUgaauCgsa | | AAUgCAUCAG |
| | | | | gsc |
| unMod SiRNA | 9552 | GCGUUCUGUG | 9553 | GUUGACAACC |
| | | GUUGUCAACA | | ACAGAACGCU |
| | | G | | G |
| Fluc Control | 9554 | cuUacgCUGa | 9555 | dTCGAAGUAC |
| | | gUacuuCgsa | | UCAgCGUAAG |
| | | | | usu |

TABLE A3

| | |
|---|---|
| Core | Core |

| | sense | | antisense | | | | | | | | |
|---|---|---|---|---|---|---|---|---|---|---|---|
| | strand | | strand | Cross-reactivity | | | | | | | |
| SEQ | sequence | SEQ | sequence | 5 | 10 | 6 | 6 | 5 | 10 | 6 | 6 |
| ID | (5′-3′) | ID | (5′-3′) | 19 mer | | | | 21 mer | | | |
| NO: | 19 mer | NO: | 21 mer | Human | Mouse | Rhesus | Cyno | Human | Mouse | Rhesus | Cyno |
| 9508 | GGUACUCCGC | 9509 | UUUUUACUUG | 0 | 1 | 0 | 0 | 0 | 1 | 0 | 0 |
| | AAGUAAAAA | | CGGAGUACCA | | | | | | | | |
| | | | G | | | | | | | | |
| 9510 | CACUCAUCCU | 9511 | UUAGUCUGUA | 0 | 1 | 0 | 0 | 0 | 1 | 0 | 0 |
| | ACAGACUAA | | GGAUGAGUGA | | | | | | | | |
| | | | U | | | | | | | | |
| 9512 | GCUUAACUGU | 9513 | UAGUCGACAA | 0 | 1 | 0 | 0 | 0 | 1 | 0 | 0 |
| | UGUCGACUA | | CAGUUAAGCU | | | | | | | | |
| | | | G | | | | | | | | |
| 9514 | ACCUUGACUG | 9515 | UAUCUUUGAC | 1 | 1 | 1 | 1 | 1 | 1 | 1 | 1 |
| | UCAAAGAUA | | AGUCAAGGUG | | | | | | | | |
| | | | A | | | | | | | | |
| 9516 | CCUACACGUU | 9517 | UUCAGGUGAA | 0 | 1 | 1 | 1 | 0 | 1 | 1 | 1 |
| | UCACCUGAA | | ACGUGUAGGU | | | | | | | | |
| | | | C | | | | | | | | |
| 9518 | GGUGCUGGAU | 9519 | UAUGUCGGAA | 1 | 1 | 1 | 1 | 1 | 1 | 1 | 1 |
| | UCCGACAUA | | UCCAGCACCC | | | | | | | | |
| | | | C | | | | | | | | |
| 9520 | CUGGAUUCCG | 9521 | UAAUGAUGUC | 1 | 1 | 1 | 1 | 1 | 1 | 1 | 1 |
| | ACAUCAUUA | | GGAAUCCAGC | | | | | | | | |
| | | | A | | | | | | | | |
| 9522 | GCAAAAGAUU | 9523 | UUACGGCUGA | 1 | 1 | 1 | 1 | 1 | 1 | 1 | 1 |
| | CAGCCGUAA | | AUCUUUUGCA | | | | | | | | |
| | | | C | | | | | | | | |
| 9524 | CAAAAGAUUC | 9525 | UGUACGGCUG | 1 | 1 | 1 | 1 | 1 | 1 | 1 | 1 |
| | AGCCGUACA | | AAUCUUUUGC | | | | | | | | |
| | | | A | | | | | | | | |
| 9526 | CUGAUGCAUU | 9527 | UCGAUUCAGA | 0 | 1 | 0 | 0 | 0 | 1 | 0 | 0 |
| | CUGAAUCGA | | AUGCAUCAGG | | | | | | | | |
| | | | C | | | | | | | | |

| | siRNA strands with modifications | | | | Dose-response analysis | | |
|---|---|---|---|---|---|---|---|
| | | Sense | | Antisense | in Hepa1.6 cells | | |
| | SEQ | strand | SEQ | strand | | | Max. |
| Duplex | ID | sequence | ID | sequence | IC20 | IC50 | Inhib. |
| ID | NO: | (5′-3′) | NO: | (5′-3′) | [nM] | [nM] | [%] |
| XD-51567 | 9532 | ggUacuCCGc | 9533 | dTUUUUACUU | 0.326 | 2.1 | 73.1 |
| | | aAguaaAasa | | GCGgAGUACC | | | |
| | | | | asg | | | |
| XD-51568 | 9534 | caCucaUCCu | 9535 | dTUAGUCUGU | 0.059 | 0.47 | 73.9 |
| | | aCagacUasa | | AGGaUGAGUG | | | |
| | | | | asu | | | |
| XD-51569 | 9536 | gcUuaaCUGu | 9537 | dTAGUCGACA | 0.107 | 0.44 | 76.2 |
| | | uGucgaCusa | | ACAgUUAAGC | | | |
| | | | | usg | | | |
| XD-51570 | 9538 | acCuugACUg | 9539 | dTAUCUUUGA | 0.034 | 0.27 | 76.4 |
| | | uCaaagAusa | | CAGuCAAGGU | | | |
| | | | | gsa | | | |
| XD-51571 | 9540 | ccUacaCGUu | 9541 | dTUCAGGUGA | 0.089 | 0.49 | 74.1 |
| | | uCaccuGasa | | AACgUGUAGG | | | |
| | | | | usc | | | |
| XD-51572 | 9542 | ggUgcuGGAu | 9543 | dTAUGUCGGA | 0.031 | 0.4 | 74.6 |
| | | uCcgacAusa | | AUCcAGCACC | | | |
| | | | | esc | | | |
| XD-51573 | 9544 | cuGgauUCCg | 9545 | dTAAUGAUGU | 0.074 | 0.94 | 71.5 |
| | | aCaucaUusa | | CGGaAUCCAG | | | |
| | | | | csa | | | |
| XD-51574 | 9546 | gcAaaaGAUu | 9547 | dTUACGGCUG | 0.02 | 0.41 | 75.6 |
| | | cAgccgUasa | | AAUcUUUUGC | | | |
| | | | | asc | | | |
| XD-51575 | 9548 | caAaagAUUc | 9549 | dTGUACGGCU | 0.043 | 0.23 | 75.8 |
| | | aGccguAcsa | | GAAuCUUUUG | | | |
| | | | | csa | | | |
| XD-51576 | 9550 | cuGaugCAUu | 9551 | dTCGAUUCAG | 0.139 | 5.39 | 65.6 |
| | | cUgaauCgsa | | AAUgCAUCAG | | | |
| | | | | gsc | | | |

[0146] In some embodiments, the RNAi molecule is single-stranded. In some embodiments, the RNAi molecule is double-stranded. It should be noted that, any nucleotide lengths of any RNAi molecules recited in this application refer to a single strand of the RNAi molecule, even if that single strand is a member of a double-stranded RNAi molecule. For example, if an RNAi molecule is 21 nucleotides in length and is double stranded (without overhangs), the molecule would comprise a total of 42 nucleotides (21 nucleotides in each strand). In some embodiments, the RNAi molecule is double stranded and comprises blunt ends. In some embodiments, the RNAi molecule is double-stranded and comprises overhangs of one or more nucleotides. In some embodiments, the RNAi molecule is double stranded for only a portion of the molecule. For example, in some embodiments, a double-stranded RNAi molecule comprises overhangs on the sense and/or antisense strand of 1, 2, 3, 4, or 5 or more nucleotides. In some embodiments, a double-stranded RNAi molecule comprises overhangs on the sense and/or antisense strand of 1, 2 or 3 nucleotides.

[0147] In some embodiments, any of the RNAi molecules (e.g., siRNA molecules) disclosed herein comprises a nucleotide sequence that shares complementarity (e.g., 100% complementarity) with a target sequence in an AAVR RNA transcript. In some embodiments, the RNAi molecule comprises at least 17, 18, 19, 20, or 21 nucleotides that are complementary to a target sequence in an AAVR RNA transcript. In some embodiments, the RNAi molecule comprises at least 17, 18, 19, 20, or 21 nucleotides that are complementary to a target sequence in an AAVR RNA transcript, but wherein one or more nucleotides on the 3′ end of the RNAi molecule are not complementary to the target sequence in the AAVR RNA transcript. In some embodiments, the RNAi molecule comprises at least 17, 18, 19, 20, or 21 nucleotides that are complementary to a target sequence in an AAVR RNA transcript, but wherein one or more nucleotides on the 5′ end of the RNAi molecule are not complementary to the target sequence in the AAVR RNA transcript. In some embodiments, the RNAi molecule comprises at least 17, 18, 19, 20, or 21 nucleotides that are complementary to a target sequence in an AAVR RNA transcript, but wherein one or more nucleotides on the 3′ end and the 5′ end of the RNAi molecule are not complementary to the target sequence in the AAVR RNA transcript.

### B. Agent Delivery

[0148] In some embodiments, any of the agents that block AAV binding to an AAVR as disclosed herein are administered “naked”, i.e., without a molecule intended for a cell or tissue-specific delivery. For example, in some embodiments, the agent is administered “naked” in a pharmaceutically acceptable buffer, e.g., a buffered saline solution such as PBS.

[0149] In some embodiments, the compositions comprise an agent that blocks AAV binding to an AAV receptor (AAVR) and a delivery molecule that delivers the agent to the liver. In some embodiments, the compositions comprise a siRNA conjugated to a liver-targeting moiety. As used herein, “liver targeting moiety” includes but is not limited to any conjugate that can be applied to any of the agents that block AAV binding to an AAVR (e.g., siRNAs or RNAi) to enhance their delivery and/or uptake by the liver, including any known conjugates. Lipid moieties (e.g., lipid-conjugated siRNAs), such as cholesterol-conjugated siRNAs, and any other conjugates groups or moieties that are known in the art to effectively target the liver can also be used. In some embodiments, the delivery molecule comprises a lipid. In some embodiments, the compositions comprise lipid-conjugated siRNAs.

[0150] In some embodiments, the delivery molecule comprises at least one galactose or galactose derivative. In some embodiments, the compositions comprise siRNA conjugated to at least one galactose or galactose derivative. Galactose or galactose derivatives can target hepatocytes via their binding to the asialo glycoprotein receptor that is unique to and is highly expressed on the surface of hepatocytes (ASGPr). Binding of galactose moieties to ASGPr facilitates intracellular entry of the cell-specific target of the transferring polymer into the hepatocyte and the delivery polymer to the hepatocyte. Exemplary galactose or galactose derivatives include lactose, galactose, N-acetylgalactosamine (GalNAc), galactosamine, N-formylgalactosamine, N-acetylgalactosamine, N-propionylgalactosamine, Nn-butanoylgalactosamine, and N-isobutanoyl-galactosamine (Iobst, S T and Drickamer, K. JBC 1996, 271, 6686). In some embodiments, the delivery molecule comprises N-acetylgalactosamine (GalNAc). In some embodiments, the compositions comprise GalNAc-conjugated siRNAs.

[0151] As is also known in the art, the agent that blocks AAV binding to an AAVR can be delivered by non-viral tissue-specific delivery vehicles. In some embodiments, nanoparticles, liposomes, ribonucleoproteins, positively charged peptides, small molecule RNA-conjugates, aptamer-RNA chimeras, and RNA-fusion protein complexes are used to deliver the siRNA. In some embodiments, the delivery molecule comprises a lipid nanoparticle (LNP). In some embodiments, the composition comprises a LNP to deliver the agent to the liver.

[0152] A LNP refers to any particle having a diameter of less than 1000 nm, 500 nm, 250 nm, 200 nm, 150 nm, 100 nm, 75 nm, 50 nm, or 25 nm. Alternatively, a nanoparticle can range in size from 1-1000 nm, 1-500 nm, 1-250 nm, 25-200 nm, 25-100 nm, 35-75 nm, or 25-60 nm.

[0153] LNPs can be made from cationic, anionic, or neutral lipids. Neutral lipids, such as the fusogenic phospholipid DOPE or the membrane component cholesterol, can be included in LNPs as ‘helper lipids’ to enhance transfection activity and nanoparticle stability. Limitations of cationic lipids include low efficacy owing to poor stability and rapid clearance, as well as the generation of inflammatory or anti-inflammatory responses. LNPs can also be comprised of hydrophobic lipids, hydrophilic lipids, or both hydrophobic and hydrophilic lipids. Any lipid or combination of lipids that are known in the art can be used to produce a LNP. Examples of lipids used to produce LNPs are: DOTMA, DOSPA, DOTAP, DMRIE, DC-cholesterol, DOTAP-cholesterol, GAP-DMORIE-DPyPE, and GL67A-DOPE-DMPE-polyethylene glycol (PEG). Examples of cationic lipids are: 98N12-5, C12-200, DLin-KC2-DMA (KC2), DLin-MC3-DMA (MC3), XTC, MD1, and 7C1. Examples of neutral lipids are: DPSC, DPPC, POPC, DOPE, and SM. Examples of PEG-modified lipids are: PEG-DMG, PEG-CerC14, and PEG-CerC20. The lipids can be combined in any number of molar ratios to produce a LNP. In addition, the polynucleotide(s) can be combined with lipid(s) in a wide range of molar ratios to produce a LNP.

### C. Anti-AAVR Antibodies

[0154] In some embodiments, the compositions comprise an anti-AAVR antibody to block AAV binding to an AAVR and otherwise reduce the interaction between AAVs and the receptor. It was previously found that AAV receptor (AAVR, also known as KIAA0319L) directly binds to AAV particles and is involved in AAV infection. In a study, it was found that anti-AAVR antibodies can block AAV2 infection. See Pillay, Nature, 530(7588): 108-112 (2016). Antibodies directed against AAVR were capable of potentially blocking AAV2 infection by more than 10-fold prior to infection, suggesting that blocking AAV access to AAVR on the cell surface substantially limits infection.

[0155] In some embodiments, the anti-AAVR antibody binds to an AAVR comprising a sequence that is at least 85%, 90%, 91%, 92%, 93%, 94%, 95%, 96%, 97%, 98%, 99% or 100% identical to SEQ ID NO: 301 and inhibits binding between the AAVR and an AAV. In some embodiments, the anti-AAVR antibody binds to any one or more of the following residues in AAVR: Arg406, Ser413, Ile419, Thr423, Ser425, Thr426, Val427, Asp429, Ser431, Gln432, Ser433, Thr434, Asp435, Asp436, Asp437, Lys438, Ile439, Tyr442, Glu458, Asp459, Ile462, and/or Lys464 of a protein comprising a sequence that is at least 85%, 90%, 91%, 92%, 93%, 94%, 95%, 96%, 97%, 98%, 99% or 100% identical to SEQ ID NO: 301. See, e.g., Meyer et al., 2019, eLife, 8:e44707. In some embodiments, the antibody binds to the AAVR and sterically blocks the interaction of the AAV to the AAVR. In some embodiments, the antibody binds to the AAVR and sterically blocks the interaction of the AAV for any one or more of the following residues in AAVR: Arg406, Ser413, Ile419, Thr423, Ser425, Thr426, Val427, Asp429, Ser431, Gln432, Ser433, Thr434, Asp435, Asp436, Asp437, Lys438, Ile439, Tyr442, Glu458, Asp459, Ile462, and/or Lys464 of a sequence that is at least 85%, 90%, 91%, 92%, 93%, 94%, 95%, 96%, 97%, 98%, 99% or 100% identical to SEQ ID NO: 301. In some embodiments, the compositions comprise anti-AAVR antibodies known in the art, including, for example ab105385 (Abcam).

SEQ ID NO: 301:
MEKRLGVKPNPASWILSGYYWQTSAKWLRSLYLFYTCFCFSVLWLS
TDASESRCQQGKTQFGVGLRSGGENHLWLLEGTPSLQSCWAACCQ
DSACHVFWWLEGMCIQADCSRPQSCRAFRTHSSNSMLVFLKKFQT
ADDLGFLPEDDVPHLLGLGWNWASWRQSPPRAALRPAVSSSDQQS
LIRKLQKRGSPSDVVTPIVTQHSKVNDSNELGGLTTSGSAEVHKA
ITISSPLTTDLTAELSGGPKNVSVQPEISEGLATTPSTQQVKSSE
KTQIAVPQPVAPSYSYATPTPQASFQSTSAPYPVIKELVVSAGES
VQITLPKNEVQLNAYVLQEPPKGETYTYDWQLITHPRDYSGEMEG
KHSQILKLSKLTPGLYEFKVIVEGQNAHGEGYVNVTVKPEPRKNR
PPIAIVSPQFQEISLPTTSTVIDGSQSTDDDKIVQYHWEELKGPL
REEKISEDTAILKLSKLVPGNYTFSLTVVDSDGATNSTTANLTVN
KAVDYPPVANAGPNQVITLPQNSITLFGNQSTDDHGITSYEWSLS
PSSKGKVVEMQGVRTPTLQLSAMQEGDYTYQLTVTDTIGQQATAQ
VTVIVQPENNKPPQADAGPDKELTLPVDSTTLDGSKSSDDQKIIS
YLWEKTQGPDGVQLENANSSVATVTGLQVGTYVFTLTVKDERNLQ
SQSSVNVIVKEEINKPPIAKITGNVVITLPTSTAELDGSKSSDDK
GIVSYLWTRDEGSPAAGEVLNHSDHHPILFLSNLVEGTYTFHLKV
TDAKGESDTDRTTVEVKPDPRKNNLVEIILDINVSQLTERLKGMF
IRQIGVLLGVLDSDIIVQKIQPYTEQSTKMVFFVQNEPPHQIFKG
HEVAAMLKSELRKQKADFLIFRALEVNTVTCQLNCSDHGHCDSFT
KRCICDPFWMENFIKVQLRDGDSNCEWSVLYVIIATFVIVVALGI
LSWTVICCCKRQKGKPKRKSKYKILDATDQESLELKPTSRAGIKQ
KGLLLSSSLMHSESELDSDDAIFTWPDREKGKLLHGQNGSVPNGQ
TPLKARSPREEIL

### D. Antisense Oligonucleotides

[0156] In some embodiments, the compositions comprise short single-stranded oligonucleotides (RNA or DNA) that are capable of binding to target sequences, e.g., inactivating or interfering with corresponding AAVR mRNA or DNA sequences, thereby down-regulating the expression of the target AAVR genes.

[0157] In some embodiments, the composition comprises an antisense oligonucleotide, also referred to herein as “ASO,” to block AAV binding to AAVR in the liver. The antisense oligonucleotide can be a single or double stranded DNA or RNA or chimeric mixtures or derivatives or modified versions thereof. As is known in the art, for antisense oligonucleotides to sufficiently inhibit their target sequence as efficiently as possible, there should be a degree of complementarity between the antisense oligonucleotides and the corresponding target sequence. Chemical modifications of ASOs are known in the art to increase their resistance to various nucleases, as well as their binding affinity to RNA targets. Phosphorothioate (PS) modification, in which a non-bridging oxygen is replaced by a sulfur atom in the phosphate backbone; 2′-O-methyl (2′-O-Me), 2′-O-methoxyethyl (MOE) modification; constrained ethyl (cEt) modification; and bicyclic nucleoside modifications such as 2′,4′-methylene bridged nucleic acids, commonly called locked nucleic acid (LNA) modification, are non-limiting examples. Accordingly, in some embodiments, the antisense oligonucleotide comprises a modified sequence. In some embodiments, the ASO contains MOE or LNA modifications.

[0158] In some embodiments, the antisense oligonucleotide is linked to ligands or conjugates known in the art and/or described herein or delivered by non-viral tissue-specific delivery vehicles, which may be used, e.g., to increase the cellular uptake of antisense oligonucleotides.

[0159] In some embodiments, the antisense oligonucleotide is administered without conjugation and without a non-viral tissue-specific delivery vehicle. In some embodiments, the antisense oligonucleotides are administered without a non-viral tissue-specific delivery vehicle and are administered in a composition comprising a pharmaceutically acceptable carrier.

[0160] In some embodiments, any of the ASOs disclosed herein are administered “naked”, i.e., without a molecule intended for a cell or tissue-specific delivery. For example, in some embodiments, the agent is administered “naked” in a pharmaceutically acceptable buffer, e.g., a buffered saline solution such as PBS.

[0161] In some embodiments, any of the ASOs disclosed herein is at least 14, 15, 16, 17, 18, 19, 20, 21, 22, 23, 24, or 25 nucleotides in length. In some embodiments, any of the ASOs disclosed herein is no more than 35, 34, 33, 32, 31, 30, 29, 28, 27, 26 or 25 nucleotides in length. In some embodiments, any of the ASOs disclosed herein is between 14-35, 14-30, 14-25, 14-20, 20-35, 20-30, 20-25, 25-35, or 25-30 nucleotides in length. In some embodiments, the ASO is less than 20 nucleotides in length. In some embodiments, the ASO is 14-18, 15-17, or 16 nucleotides in length.

[0162] Methods of generating antisense oligonucleotides are known in the art. In some embodiments, the antisense oligonucleotide targets an AAVR-encoding transcript. In some embodiments, the AAVR-encoding transcript comprises a sequence that is at least 80%, 85%, 90%, 91%, 92%, 93%, 94%, 95%, 96%, 97%, 98%, 99% or 100% identical to the sequence of SEQ ID NO: 300, or a reverse complement thereof. In some embodiments, the antisense oligonucleotide targets 19, 20, 21, 22, 23, 24, 25, 26, 27, 28, 29, 30, 31 or 32 contiguous nucleotides of a sequence that is at least 80%, 85%, 90%, 91%, 92%, 93%, 94%, 95%, 96%, 97%, 98%, 99% or 100% identical to the sequence of SEQ ID NO: 300, or a reverse complement thereof. In some embodiments, the antisense oligonucleotide targets 19-32, 19-25, 19-22, or 20-21 contiguous nucleotides of a sequence that is at least 80%, 85%, 90%, 91%, 92%, 93%, 94%, 95%, 96%, 97%, 98%, 99% or 100% identical to the sequence of SEQ ID NO: 300, or a reverse complement thereof.

[0163] In some embodiments, any of the ASOs disclosed herein comprises any of the sequences disclosed in Table B. In some embodiments, any of the ASOs disclosed herein comprises any of the sequences disclosed in the sequences of SEQ ID Nos: 9600-9625. In some embodiments, any of the ASOs disclosed herein comprises a sequence that is at least 80%, 85%, 90%, 91%, 92%, 93%, 94%, 95%, 96%, 97%, 98%, 99% or 100% identical to any of the sequences of SEQ ID Nos: 9600-9625. In some embodiments, the ASO comprises at least 14-20, 15-20, 16-20, 17-20, 18-20, or 19-20 consecutive nucleotides of any one or more SEQ ID Nos: 9600-9625 or of any sequence that is at least 80%, 85%, 90%, 91%, 92%, 93%, 94%, 95%, 96%, 97%, 98%, 99% or 100% identical to any of the sequences of SEQ ID Nos: 9600-9625. In some embodiments, the ASO comprises the nucleotide sequence of SEQ ID NO: 9600 or a nucleotide sequence that is at least 14-20, 15-20, 16-20, 17-20, 18-20, or 19-20 consecutive nucleotides of any one or more SEQ ID Nos: 9600. In some embodiments, the ASO comprises the nucleotide sequence of SEQ ID NO: 9601 or a nucleotide sequence that is at least 14-20, 15-20, 16-20, 17-20, 18-20, or 19-20 consecutive nucleotides of any one or more SEQ ID Nos: 9601. In some embodiments, the ASO comprises the nucleotide sequence of SEQ ID NO: 9602 or a nucleotide sequence that is at least 14-20, 15-20, 16-20, 17-20, 18-20, or 19-20 consecutive nucleotides of any one or more SEQ ID Nos: 9602. In some embodiments, the ASO comprises the nucleotide sequence of SEQ ID NO: 9603 or a nucleotide sequence that is at least 14-20, 15-20, 16-20, 17-20, 18-20, or 19-20 consecutive nucleotides of any one or more SEQ ID Nos: 9603. In some embodiments, the ASO comprises the nucleotide sequence of SEQ ID NO: 9604 or a nucleotide sequence that is at least 14-20, 15-20, 16-20, 17-20, 18-20, or 19-20 consecutive nucleotides of any one or more SEQ ID Nos: 9604. In some embodiments, the ASO comprises the nucleotide sequence of SEQ ID NO: 9605 or a nucleotide sequence that is at least 14-20, 15-20, 16-20, 17-20, 18-20, or 19-20 consecutive nucleotides of any one or more SEQ ID Nos: 9605. In some embodiments, the ASO comprises the nucleotide sequence of SEQ ID NO: 9606 or a nucleotide sequence that is at least 14-20, 15-20, 16-20, 17-20, 18-20, or 19-20 consecutive nucleotides of any one or more SEQ ID Nos: 9606. In some embodiments, the ASO comprises the nucleotide sequence of SEQ ID NO: 9607 or a nucleotide sequence that is at least 14-20, 15-20, 16-20, 17-20, 18-20, or 19-20 consecutive nucleotides of any one or more SEQ ID Nos: 9607. In some embodiments, the ASO comprises the nucleotide sequence of SEQ ID NO: 9608 or a nucleotide sequence that is at least 14-20, 15-20, 16-20, 17-20, 18-20, or 19-20 consecutive nucleotides of any one or more SEQ ID Nos: 9608. In some embodiments, the ASO comprises the nucleotide sequence of SEQ ID NO: 9609 or a nucleotide sequence that is at least 14-20, 15-20, 16-20, 17-20, 18-20, or 19-20 consecutive nucleotides of any one or more SEQ ID Nos: 9609. In some embodiments, the ASO comprises the nucleotide sequence of SEQ ID NO: 9610 or a nucleotide sequence that is at least 14-20, 15-20, 16-20, 17-20, 18-20, or 19-20 consecutive nucleotides of any one or more SEQ ID Nos: 9610. In some embodiments, the ASO comprises the nucleotide sequence of SEQ ID NO: 9611 or a nucleotide sequence that is at least 14-20, 15-20, 16-20, 17-20, 18-20, or 19-20 consecutive nucleotides of any one or more SEQ ID Nos: 9611. In some embodiments, the ASO comprises the nucleotide sequence of SEQ ID NO: 9612 or a nucleotide sequence that is at least 14-20, 15-20, 16-20, 17-20, 18-20, or 19-20 consecutive nucleotides of any one or more SEQ ID Nos: 9612. In some embodiments, the ASO comprises the nucleotide sequence of SEQ ID NO: 9613 or a nucleotide sequence that is at least 14-20, 15-20, 16-20, 17-20, 18-20, or 19-20 consecutive nucleotides of any one or more SEQ ID Nos: 9613. In some embodiments, the ASO comprises the nucleotide sequence of SEQ ID NO: 9614 or a nucleotide sequence that is at least 14-20, 15-20, 16-20, 17-20, 18-20, or 19-20 consecutive nucleotides of any one or more SEQ ID Nos: 9614. In some embodiments, the ASO comprises the nucleotide sequence of SEQ ID NO: 9615 or a nucleotide sequence that is at least 14-20, 15-20, 16-20, 17-20, 18-20, or 19-20 consecutive nucleotides of any one or more SEQ ID Nos: 9615. In some embodiments, the ASO comprises the nucleotide sequence of SEQ ID NO: 9616 or a nucleotide sequence that is at least 14-20, 15-20, 16-20, 17-20, 18-20, or 19-20 consecutive nucleotides of any one or more SEQ ID Nos: 9616. In some embodiments, the ASO comprises the nucleotide sequence of SEQ ID NO: 9617 or a nucleotide sequence that is at least 14-20, 15-20, 16-20, 17-20, 18-20, or 19-20 consecutive nucleotides of any one or more SEQ ID Nos: 9617. In some embodiments, the ASO comprises the nucleotide sequence of SEQ ID NO: 9618 or a nucleotide sequence that is at least 14-20, 15-20, 16-20, 17-20, 18-20, or 19-20 consecutive nucleotides of any one or more SEQ ID Nos: 9618. In some embodiments, the ASO comprises the nucleotide sequence of SEQ ID NO: 9619 or a nucleotide sequence that is at least 14-20, 15-20, 16-20, 17-20, 18-20, or 19-20 consecutive nucleotides of any one or more SEQ ID Nos: 9619. In some embodiments, the ASO comprises the nucleotide sequence of SEQ ID NO: 9620 or a nucleotide sequence that is at least 14-20, 15-20, 16-20, 17-20, 18-20, or 19-20 consecutive nucleotides of any one or more SEQ ID Nos: 9620. In some embodiments, the ASO comprises the nucleotide sequence of SEQ ID NO: 9621 or a nucleotide sequence that is at least 14-20, 15-20, 16-20, 17-20, 18-20, or 19-20 consecutive nucleotides of any one or more SEQ ID Nos: 9621. In some embodiments, the ASO comprises the nucleotide sequence of SEQ ID NO: 9622 or a nucleotide sequence that is at least 14-20, 15-20, 16-20, 17-20, 18-20, or 19-20 consecutive nucleotides of any one or more SEQ ID Nos: 9622. In some embodiments, the ASO comprises the nucleotide sequence of SEQ ID NO: 9623 or a nucleotide sequence that is at least 14-20, 15-20, 16-20, 17-20, 18-20, or 19-20 consecutive nucleotides of any one or more SEQ ID Nos: 9623. In some embodiments, the ASO comprises the nucleotide sequence of SEQ ID NO: 9624 or a nucleotide sequence that is at least 14-20, 15-20, 16-20, 17-20, 18-20, or 19-20 consecutive nucleotides of any one or more SEQ ID Nos: 9624. In some embodiments, the ASO comprises the nucleotide sequence of SEQ ID NO: 9625 or a nucleotide sequence that is at least 14-20, 15-20, 16-20, 17-20, 18-20, or 19-20 consecutive nucleotides of any one or more SEQ ID Nos: 9625. In some embodiments, the ASO comprises the nucleotide sequence of SEQ ID NO: 9626 or a nucleotide sequence that is at least 14-20, 15-20, 16-20, 17-20, 18-20, or 19-20 consecutive nucleotides of any one or more SEQ ID Nos: 9626. In some embodiments, the ASO is no more than 20, no more than 19, no more than 18, no more than 17, no more than 16, no more than 15 or no more than 15 nucleotides in length. In some embodiments, the ASO is no more than 16 nucleotides in length.

[0164] Sequences for the modified ASOs that were used in the examples are set forth in Table B below. In the ASO sequence modifications, the “*” indicates that the bond between the two bases is a phosphorothioate, while the “+” indicates that the nucleic acid is a locked nucleic acid (LNA). For the MOE-modified ASOs, “2MOEr” indicates that a specific base is a 2′-O-methoxy-ethyl Base (2′-MOE). A “5” before “2MOEr” indicates that it is the first (5′) base in the oligo, a “3” indicates that it is the last (3′) base in the oligo, and an “i” indicates that it is an internal base (middle of the oligo). The last letter is the identity of the base, namely A, T, C, or G; each base's designation is separated by slashes.

TABLE B

| CRO/ | SEQ | | |
|---|---|---|---|
| internal | ID | ASO Sequence | |
| label | NO: | Unmodified | ASO Sequence Modification |
| AAVR_ASO_1 | 9600 | CAGCTGCCAGTCGTAGGTGT | +C*+A*+G*+C*+T*G*C*C*A*G*T*C |
| | | | *G*T*A*+G*+G*+T*+G*+T |
| AAVR_ASO_2 | 9601 | TAGCCTTCCCCATGGGCATT | +T*+A*+G*+C*+C*T*T*C*C*C*C*A* |
| | | | T*G*G*+G*+C*+A*+T*+T |
| AAVR_3 | 9602 | ATCTCCTGGAACTGAGGTGA | +A*+T*+C*+T*+C*C*T*G*G*A*A*C |
| | | | *T*G*A*+G*+G*+T*+G*+A |
| AAVR_ASO_4 | 9603 | GATCACTTGGTTGGGGCCTG | +G*+A*+T*+C*+A*C*T*T*G*G*T*T* |
| | | | G*G*G*+G*+C*+C*+T*+G |
| AAVR_ASO_5/ | 9604 | CTGCATCTGCCTGAGGAGGC | +C*+T*+G*+C*+A*T*C*T*G*C*C*T* |
| IH_ASO5 | | | G*A*G*+G*+A*+G*+G*+C |
| AAVR_ASO_6/ | 9605 | CTCATCTTTGACAGTCAAGG | +C*+T*+C*+A*+T*C*T*T*T*G*A*C* |
| IH_ASO6 | | | A*G*T*+C*+A*+A*+G*+G |
| AAVR_7 | 9606 | ATCCCCTTCAGCCTCTCAGT | +A*+T*+C*+C*+C*C*T*T*C*A*G*C* |
| | | | C*T*C*+T*+C*+A*+G*+T |
| AAVR_8/ | 9607 | CCCCCAGGAGGACCCCAATC | +C*+C*+C*+C*+C*A*G*G*A*G*G*A |
| IH-ASO8 | | | *C*C*C*+C*+A*+A*+T*+C |
| LNA_1/ | 9608 | TCTTTGACAGTCAAGG | +T*+C*+T*T*T*G*A*C*A*G*T*C*A* |
| ASOVT002 | | | +A*+G*+G |
| LNA_2 | 9609 | TGTCGGAATCCAGCAC | +T*+G*+T*C*G*G*A*A*T*C*C*A*G |
| | | | *+C*+A*+C |
| LNA_3 | 9610 | ATGATGTCGGAATCCA | +A*+T*+G*A*T*G*T*C*G*G*A*A*T |
| | | | *+C*+C*+A |
| LNA_4 | 9611 | ACGGCTGAATCTTTTG | +A*+C*+G*G*C*T*G*A*A*T*C*T*T |
| | | | *+T*+T*+G |
| LNA_5 | 9612 | TACGGCTGAATCTTTT | +T*+A*+C*G*G*C*T*G*A*A*T*C*T |
| | | | *+T*+T*+T |
| LNA_IH5 | 9613 | GCATCTGCCTGAGGAG | +G*+C*+A*T*C*T*G*C*C*T*G*A*G |
| | | | *+G*+A*+G |
| LNA_IH6 | 9614 | CATCTTTGACAGTCAA | +C*+A*+T*C*T*T*T*G*A*C*A*G*T* |
| | | | +C*+A*+A |
| LNA_IH8 | 9615 | CCCAGGAGGACCCCAA | *+C*+A*+A |
| 18_MOE_1 | 9616 | ATCTTTGACAGTCAAGGT | /52MOErA//i2MOErT//i2MOErC//i2MO |
| | | | ErT/TTGACAGTCA/12MOErA//12MOEr |
| | | | G//12MOErG//32MOErT/ |
| 18_MOE_2 | 9617 | ATGTCGGAATCCAGCACC | /52MOErA//i2MOErT//i2MOErG//i2MO |
| | | | ErT/CGGAATCCAG/12MOErC//12MOE |
| | | | rA//12MOErC//32MOErC/ |
| 18_MOE_3 | 9618 | AATGATGTCGGAATCCAG | /52MOErA//i2MOErA//i2MOErT//i2MO |
| | | | ErG/ATGTCGGAAT/i2MOErC//i2MOE |
| | | | rC//i2MOErA//32MOErG/ |
| 18_MOE_4 | 9619 | TACGGCTGAATCTTTTGC | /52MOErT//i2MOErA//i2MOErC//i2MO |
| | | | ErG/GCTGAATCTT/12MOErT//i2MOEr |
| | | | T//12MOErG//32MOErC/ |
| 18_MOE_5 | 9620 | GTACGGCTGAATCTTTTG | /52MOErG//i2MOErT//i2MOErA//i2MO |
| | | | ErC/GGCTGAATCT/i2MOErT//i2MOEr |
| | | | T//12MOErT//32MOErG/ |
| 18_MOE_IH5 | 9621 | TGCATCTGCCTGAGGAGG | /52MOErT//i2MOErG//i2MOErC//i2MO |
| | | | ErA/TCTGCCTGAG/12MOErG//i2MOEr |
| | | | A//i2MOErG//32MOErG/ |
| 18_MOE_IH6 | 9622 | TCATCTTTGACAGTCAAG | /52MOErT//i2MOErC//i2MOErA//12MO |
| | | | ErT/CTTTGACAGT/12MOErC//i2MOEr |
| | | | A//12MOErA//32MOErG/ |
| 18_MOE_IH8 | 9623 | CCCCAGGAGGACCCCAAT | /52MOErC//i2MOErC//i2MOErC//i2MO |
| | | | ErC/AGGAGGACCC/i2MOErC//i2MOE |
| | | | rA//i2MOErA//32MOErT/ |
| LNA_Control | 9624 | GGCTACTACGCCGTCA | GGCTACTACGCCGTCA |
| MOE_Control | 9625 | TTAGTTTAATCACGCTCG | /52MOErT//i2MOErT//i2MOErA//12MO |
| | | | ErG/TTTAATCACG/i2MOErC//i2MOEr |
| | | | T//12MOErC//32MOErG/ |

E. Small Molecules and Other Agents that Block AAV Binding to AAVR

[0165] In some embodiments, the compositions comprise small molecules that block AAVR binding to AAVs and/or otherwise inhibit or reduce the interaction between AAVs and the receptor. It is contemplated that other suitable inhibitory agents can be produced using techniques known to those of ordinary skill in the art, including inhibitors of AAVR expression.

[0166] In some embodiments, the compositions comprise a soluble variant polypeptide, that blocks binding between an AAV particle and AAVR. In some embodiments, the soluble variant polypeptide is a variant of AAVR that has a portion of the protein that is sufficient for AAV to bind at a recognizable affinity, but which lacks a transmembrane domain (e.g., lacks the naturally present transmembrane domain of the corresponding wild type protein). For example, in some embodiments, the soluble AAVR polypeptide lacks the transmembrane domain, or the transmembrane domain and the cytoplasmic tail, of the corresponding wild type AAVR protein and is capable of binding to AAV, thereby blocking the AAV particle from binding to AAVR on the cell surface (e.g., in the liver). See, e.g., U.S. Ser. No. 10/633,662B2 (Pillay).

### F. AAV Compositions

[0167] In some embodiments, AAV vectors and/or compositions thereof are administered after administering any of the compositions above that block AAV binding to an AAVR and are delivered to the liver, wherein administration of any of the compositions that block AAV binding to AAVR increases the percentage of AAV delivered to a non-liver target. Accordingly, the present invention contemplates administering a single AAV vector or multiple AAV vectors that have a non-liver target and/or compositions thereof.

[0168] In some embodiments, the AAV is an AAV1, AAV2, AAV3, AAV4, AAV5, AAV6, AAV7, AAV8, AAVrh10, AAVrh74, AAV9, AAV9P, or Myo-AAV vector. In some embodiments, the one or more AAV vectors are recombinant or engineered AAV vectors. In some embodiments, the one or more AAV vectors comprise a tissue-specific (e.g., muscle-specific) promoter, e.g., which is operatively linked to a sequence encoding a guide RNA.

[0169] In some embodiments, any of the AAVs disclosed herein comprises a tRNA or a nucleotide sequence encoding a tRNA. In some embodiments, the tRNA is a suppressor tRNA. In some embodiments, the suppressor tRNA comprises an anticodon that hybridizes to a premature stop codon in a target gene (e.g., a mutant dystrophin gene) and that is capable of being aminoacylated with an amino acid. In some embodiments, any of the AAVs disclosed herein comprises a nucleotide sequence encoding any of the tRNA molecules described in one or more of US2020277607, US2022073933, US2020291401, US2022112489, WO2019090154, WO2019090169, WO2020150608, WO2021087401, WO2020069199, or WO2018161032 each of which applications is incorporated by reference herein in its entirety.

[0170] In some embodiments, the one or more AAV vectors include CRISPR-Cas components, any of which are known in the art. In some embodiments, the one or more AAV vectors comprise a nucleic acid encoding a Cas9 protein. Such embodiments include for example, AAV vectors comprising a nucleic acid encoding Staphylococcus aureus (SaCas9) and/or Staphylococcus lugdunensis (SluCas9) and further comprising a nucleic acid encoding one or more guide RNAs. In such embodiments, the nucleic acid encoding the Cas9 protein is under the control of a CK8e promoter. In some embodiments, the nucleic acid encoding the guide RNA sequence is under the control of a hU6c promoter. In some embodiments, the vector is AAV9. In some embodiments, in addition to guide RNA and Cas9 sequences, the one or more vectors further comprise nucleic acids that do not encode guide RNAs. Nucleic acids that do not encode guide RNA and Cas9 include, but are not limited to, promoters, enhancers, and regulatory sequences. In some embodiments, the vector comprises one or more nucleotide sequence(s) encoding a crRNA, a trRNA, or a crRNA and trRNA.

[0171] In some embodiments, the muscle-cell cell specific promoter is a variant of the CK8 promoter, called CK8e. In some embodiments, the size of the CK8e promoter is 436 bp. In some embodiments, the CK8e promoter comprises a nucleotide sequence that is at least 90%, 91%, 92%, 93%, 94%, 95%, 96%, 97%, 98%, 99% or 100% identical to the sequence of SEQ ID NO: 302:

| | |
|---|---|
| 1 | TGCCCATGTA AGGAGGCAAG GCCTGGGGAC |
| | ACCCGAGATG CCTGGTTATA ATTAACCCAG |
| 61 | ACATGTGGCT GCCCCCCCCC CCCCAACACC |
| | TGCTGCCTCT AAAAATAACC CTGCATGCCA |
| 121 | TGTTCCCGGC GAAGGGCCAG CTGTCCCCCG |
| | CCAGCTAGAC TCAGCACTTA GTTTAGGAAC |
| 181 | CAGTGAGCAA GTCAGCCCTT GGGGCAGCCC |
| | ATACAAGGCC ATGGGGCTGG GCAAGCTGCA |
| 241 | CGCCTGGGTC CGGGGTGGGC ACGGTGCCCG |
| | GGCAACGAGC TGAAAGCTCA TCTGCTCTCA |
| 361 | GGGGCCCCTC CCTGGGGACA GCCCCTCCTG |
| | GCTAGTCACA CCCTGTAGGC TCCTCTATAT |
| 361 | AACCCAGGGG CACAGGGGCT GCCCTCATTC |
| | TACCACCACC TCCACAGCAC AGACAGACAC |
| 421 | TCAGGAGCCA GCCAGC |

[0172] In some embodiments, the promoter for expression of any of the nucleic acids disclosed herein is a U6 promoter. In some embodiments, the U6 promoter is a hU6c promoter and comprises a nucleotide sequence that is at least 90%, 91%, 92%, 93%, 94%, 95%, 96%, 97%, 98%, 99% or 100% identical to the sequence of SEQ ID NO: 303:

GAGGGCCTATTTCCCATGATTCCTTCATATTTGCATATACGATACAAGGC
TGTTAGAGAGATAATTGGAATTAATTTGACTGTAAACACAAAGATATTAG
TACAAAATACGTGACGTAGAAAGTAATAATTTCTTGGGTAGTTTGCAGTT
TTAAAATTATGTTTTAAAATGGACTATCATATGCTTACCGTAACTTGAAA
GTATTTCGATTTCTTGGCTTTATATATCTTGTGGAAAGGACGAAACACC.

[0173] In some embodiments, the promoter for expression of any of the nucleic acids disclosed herein is a H1 promoter. In some embodiments, the H1 promoter comprises a nucleotide sequence that is at least 90%, 91%, 92%, 93%, 94%, 95%, 96%, 97%, 98%, 99% or 100% identical to the sequence of SEQ ID NO: 304:

| | |
|---|---|
| gctcggcgcg cccatatttg catgtcgcta tgtgttctgg gaaatcacca taaacgtgaa | 60 |
| atgtctttgg atttgggaat cttataagtt ctgtatgaga ccacggta | 108 |

[0174] In some embodiments, the promoter for expression of any of the nucleic acids disclosed herein is a 7SK2 promoter. In some embodiments, the 7SK promoter is a 7SK2 promoter and comprises a nucleotide sequence that is at least 90%, 91%, 92%, 93%, 94%, 95%, 96%, 97%, 98%, 99% or 100% identical to the sequence of SEQ ID NO: 305:

CTGCAGTATTTAGCATGCCCCACCCATCTGCAAGGCATTCTGGATAGTGT
CAAAACAGCCGGAAATCAAGTCCGTTTATCTCAAACTTTAGCATTTTGGG
AATAAATGATATTTGCTATGCTGGTTAAATTAGATTTTAGTTAAATTTCC
TGCTGAAGCTCTAGTACGATAAGCAACTTGACCTAAGTGTAAAGTTGAGA
CTTCCTTCAGGTTTATATAGCTTGTGCGCCGCTTGGGTACCTC.

[0175] In some embodiments, the guide RNA is chemically modified. A guide RNA comprising one or more modified nucleosides or nucleotides is called a “modified” guide RNA or “chemically modified” guide RNA, to describe the presence of one or more non-naturally and/or naturally occurring components or configurations that are used instead of or in addition to the canonical A, G, C, and U residues. A discussion of modified guide RNAs can be found in WO2022/056000, which is incorporated herein in its entirety. In some embodiments, the guide RNAs are unmodified.

[0176] In some embodiments, the one or more vectors comprise multiple nucleic acids encoding more than one guide RNA. In some embodiments, the one or more vectors comprise two nucleic acids encoding two guide RNA sequences.

[0177] In some embodiments, the one or more vectors comprise a nucleic acid encoding a Cas9 protein (e.g., an SaCas9 protein or SluCas9 protein), a nucleic acid encoding a first guide RNA, and a nucleic acid encoding a second guide RNA. In some embodiments, the one or more vectors do not comprise a nucleic acid encoding more than two guide RNAs. In some embodiments, the nucleic acid encoding the first guide RNA is the same as the nucleic acid encoding the second guide RNA. In some embodiments, the nucleic acid encoding the first guide RNA is different from the nucleic acid encoding the second guide RNA. In some embodiments, the one or more vectors comprise a single nucleic acid molecule, wherein the single nucleic acid molecule comprises a nucleic acid encoding a Cas9 protein, a nucleic acid encoding a first guide RNA, and a nucleic acid that is the reverse complement to the coding sequence for the second guide RNA. In some embodiments, the one or more vectors comprise a single nucleic acid molecule, wherein the single nucleic acid molecule comprises a nucleic acid encoding a Cas9 protein, a nucleic acid that is the reverse complement to the coding sequence for the first guide RNA, and a nucleic acid that is the reverse complement to the coding sequence for the second guide RNA. In some embodiments, the nucleic acid encoding a Cas9 protein (e.g., an SaCas9 or SluCas9 protein) is under the control of the CK8e promoter. In some embodiments, the first guide is under the control of the 7SK2 promoter, and the second guide is under the control of the Hlm promoter. In some embodiments, the first guide is under the control of the Hlm promoter, and the second guide is under the control of the 7SK2 promoter. In some embodiments, the first guide is under the control of the hU6c promoter, and the second guide is under the control of the Hlm promoter. In some embodiments, the first guide is under the control of the Hlm promoter, and the second guide is under the control of the hU6c promoter. In some embodiments, the nucleic acid encoding the Cas9 protein is: a) between the nucleic acids encoding the guide RNAs, b) between the nucleic acids that are the reverse complement to the coding sequences for the guide RNAs, c) between the nucleic acid encoding the first guide RNA and the nucleic acid that is the reverse complement to the coding sequence for the second guide RNA, d) between the nucleic acid encoding the second guide RNA and the nucleic acid that is the reverse complement to the coding sequence for the first guide RNA, e) 5′ to the nucleic acids encoding the guide RNAs, f) 5′ to the nucleic acids that are the reverse complements to the coding sequences for the guide RNAs, g) 5′ to a nucleic acid encoding one of the guide RNAs and 5′ to a nucleic acid that is the reverse complement to the coding sequence for the other guide RNA, h) 3′ to the nucleic acids encoding the guide RNAs, i) 3′ to the nucleic acids that are the reverse complements to the coding sequences for the guide RNAs, or j) 3′ to a nucleic acid encoding one of the guide RNAs and 3′ to a nucleic acid that is the reverse complement to the coding sequence for the other guide RNA.

[0178] In some embodiments, any of the vectors disclosed herein is AAV9. In preferred embodiments, the AAV9 vector is less than 5 kb from ITR to ITR in size, inclusive of both ITRs. In particular embodiments, the AAV9 vector is less than 4.9 kb from ITR to ITR in size, inclusive of both ITRs. In further embodiments, the AAV9 vector is less than 4.85 kb from ITR to ITR in size, inclusive of both ITRs. In further embodiments, the AAV9 vector is less than 4.8 kb from ITR to ITR in size, inclusive of both ITRs. In further embodiments, the AAV9 vector is less than 4.75 kb from ITR to ITR in size, inclusive of both ITRs. In further embodiments, the AAV9 vector is less than 4.7 kb from ITR to ITR in size, inclusive of both ITRs. In some embodiments, the vector is between 3.9-5 kb, 4-5 kb, 4.2-5 kb, 4.4-5 kb, 4.6-5 kb, 4.7-5 kb, 3.9-4.9 kb, 4.2-4.9 kb, 4.4-4.9 kb, 4.7-4.9 kb, 3.9-4.85 kb, 4.2-4.85 kb, 4.4-4.85 kb, 4.6-4.85 kb, 4.7-4.85 kb, 4.7-4.9 kb, 3.9-4.8 kb, 4.2-4.8 kb, 4.4-4.8 kb or 4.6-4.8 kb from ITR to ITR in size, inclusive of both ITRs. In some embodiments, the vector is between 4.4-4.85 kb from ITR to ITR in size, inclusive of both ITRs. In some embodiments, the vector is an AAV9 vector.

[0179] In some embodiments, any of the vectors disclosed herein comprises a nucleic acid encoding at least a first guide RNA and a second guide RNA. In some embodiments, the nucleic acid comprises a spacer-encoding sequence for the first guide RNA, a scaffold-encoding sequence for the first guide RNA, a spacer-encoding sequence for the second guide RNA, and a scaffold-encoding sequence of the second guide RNA. In some embodiments, the spacer-encoding sequence (e.g., encoding any of the spacer sequences disclosed herein) for the first guide RNA is identical to the spacer-encoding sequence for the second guide RNA. In some embodiments, the spacer-encoding sequence (e.g., encoding any of the spacer sequences disclosed herein) for the first guide RNA is different from the spacer-encoding sequence for the second guide RNA. In some embodiments, the scaffold-encoding sequence for the first guide RNA is identical to the scaffold-encoding sequence for the second guide RNA. In some embodiments, the scaffold-encoding sequence for the first guide RNA is different from the scaffold-encoding sequence for the nucleic acid encoding the second guide RNA.

[0180] In some embodiments, the AAV vector comprises from 5′ to 3′ with respect to the plus strand: the reverse complement of a first sgRNA scaffold sequence, the reverse complement of a nucleic acid encoding a first sgRNA guide sequence, the reverse complement of a promoter for expression of the nucleic acid encoding the first sgRNA, a promoter for expression of a nucleic acid encoding SaCas9 (e.g., CK8e), a nucleic acid encoding SaCas9, a polyadenylation sequence, a promoter for expression of a second sgRNA, a second sgRNA guide sequence, and a second sgRNA scaffold sequence. In some embodiments the promoter for expression of the nucleic acid encoding the first and/or second sgRNA is a hU6c promoter or a 7SK2 promoter. In some embodiments the promoter for expression of the nucleic acid encoding the second sgRNA is a Hlm promoter. In some embodiments, the promoter for SaCas9 is the CK8e promoter. In some embodiments, the nucleic acid sequence encoding SaCas9 is fused to a nucleic acid sequence encoding a nuclear localization sequence (NLS). In some embodiments, the nucleic acid sequence encoding SaCas9 is fused to two nucleic acid sequences each encoding a nuclear localization sequence (NLS). In some embodiments, the nucleic acid sequence encoding SaCas9 is fused to three nucleic acid sequences each encoding a nuclear localization sequence (NLS). In some embodiments, the one or more NLSs is an SV40 NLS. In some embodiments, the one or more NLSs is a c-Myc NLS. In some embodiments, the NLS is fused to the SaCas9 with a linker.

[0181] In some embodiments, the non-liver target is the muscle. In such embodiments, the non-liver AAV-based gene therapy is used to treat DMD.

[0182] In some embodiments, the nucleic acid encoding SaCas9 encodes an SaCas9 comprising an amino acid sequence that is at least 80%, 85%, 90%, 91%, 92%, 93%, 94%, 95%, 96%, 97%, 98%, 99% or 100% identical to the sequence of SEQ ID NO: 306:

KRNYILGLDIGITSVGYGIIDYETRDVIDAGVRLFKEANVENNEGRRSKR
GARRLKRRRRHRIQRVKKLLFDYNLLTDHSELSGINPYEARVKGLSQKLS
EEEFSAALLHLAKRRGVHNVNEVEEDTGNELSTKEQISRNSKALEEKYVA
ELQLERLKKDGEVRGSINRFKTSDYVKEAKQLLKVQKAYHQLDQSFIDTY
IDLLETRRTYYEGPGEGSPFGWKDIKEWYEMLMGHCTYFPEELRSVKYAY
NADLYNALNDLNNLVITRDENEKLEYYEKFQIIENVFKQKKKPTLKQIAK
EILVNEEDIKGYRVTSTGKPEFTNLKVYHDIKDITARKEIIENAELLDQI
AKILTIYQSSEDIQEELTNLNSELTQEEIEQISNLKGYTGTHNLSLKAIN
LILDELWHTNDNQIAIFNRLKLVPKKVDLSQQKEIPTTLVDDFILSPVVK
RSFIQSIKVINAIIKKYGLPNDIIIELAREKNSKDAQKMINEMQKRNRQT
NERIEEIIRTTGKENAKYLIEKIKLHDMQEGKCLYSLEAIPLEDLLNNPF
NYEVDHIIPRSVSFDNSFNNKVLVKQEENSKKGNRTPFQYLSSSDSKISY
ETFKKHILNLAKGKGRISKTKKEYLLEERDINRFSVQKDFINRNLVDTRY
ATRGLMNLLRSYFRVNNLDVKVKSINGGFTSFLRRKWKFKKERNKGYKHH
AEDALIIANADFIFKEWKKLDKAKKVMENQMFEEKQAESMPEIETEQEYK
EIFITPHQIKHIKDFKDYKYSHRVDKKPNRELINDTLYSTRKDDKGNTLI
VNNLNGLYDKDNDKLKKLINKSPEKLLMYHHDPQTYQKLKLIMEQYGDEK
NPLYKYYEETGNYLTKYSKKDNGPVIKKIKYYGNKLNAHLDITDDYPNSR
NKVVKLSLKPYRFDVYLDNGVYKFVTVKNLDVIKKENYYEVNSKCYEEAK
KLKKISNQAEFIASFYNNDLIKINGELYRVIGVNNDLLNRIEVNMIDITY
REYLENMNDKRPPRIIKTIASKTQSIKKYSTDILGNLYEVKSKKHPQIIK
KG

[0183] In some embodiments, the SaCas9 comprises an amino acid sequence that is at least 80%, 85%, 90%, 91%, 92%, 93%, 94%, 95%, 96%, 97%, 98%, 99% or 100% identical to the sequence of SEQ ID NO: 307 (designated herein as SaCas9-KKH or SACAS9KKH):

KRNYILGLDIGITSVGYGIIDYETRDVIDAGVRLFKEANVENNEGRRSKR
GARRLKRRRRHRIQRVKKLLFDYNLLTDHSELSGINPYEARVKGLSQKLS
EEEFSAALLHLAKRRGVHNVNEVEEDTGNELSTKEQISRNSKALEEKYVA
ELQLERLKKDGEVRGSINRFKTSDYVKEAKQLLKVQKAYHQLDQSFIDTY
IDLLETRRTYYEGPGEGSPFGWKDIKEWYEMLMGHCTYFPEELRSVKYAY
NADLYNALNDLNNLVITRDENEKLEYYEKFQIIENVFKQKKKPTLKQIAK
EILVNEEDIKGYRVTSTGKPEFTNLKVYHDIKDITARKEIIENAELLDQI
AKILTIYQSSEDIQEELTNLNSELTQEEIEQISNLKGYTGTHNLSLKAIN
LILDELWHTNDNQIAIFNRLKLVPKKVDLSQQKEIPTTLVDDFILSPVVK
RSFIQSIKVINAIIKKYGLPNDIIIELAREKNSKDAQKMINEMQKRNRQT
NERIEEIIRTTGKENAKYLIEKIKLHDMQEGKCLYSLEAIPLEDLLNNPF
NYEVDHIIPRSVSFDNSFNNKVLVKQEENSKKGNRTPFQYLSSSDSKISY
ETFKKHILNLAKGKGRISKTKKEYLLEERDINRFSVQKDFINRNLVDTRY
ATRGLMNLLRSYFRVNNLDVKVKSINGGFTSFLRRKWKFKKERNKGYKHH
AEDALIIANADFIFKEWKKLDKAKKVMENQMFEEKQAESMPEIETEQEYK
EIFITPHQIKHIKDFKDYKYSHRVDKKPNRKLINDTLYSTRKDDKGNTLI
VNNLNGLYDKDNDKLKKLINKSPEKLLMYHHDPQTYQKLKLIMEQYGDEK
NPLYKYYEETGNYLTKYSKKDNGPVIKKIKYYGNKLNAHLDITDDYPNSR
NKVVKLSLKPYRFDVYLDNGVYKFVTVKNLDVIKKENYYEVNSKCYEEAK
KLKKISNQAEFIASFYKNDLIKINGELYRVIGVNNDLLNRIEVNMIDITY
REYLENMNDKRPPHIIKTIASKTQSIKKYSTDILGNLYEVKSKKHPQIIK
KG

[0184] In some embodiments, the nucleic acid encoding SluCas9 encodes a SluCas9 comprising an amino acid sequence that is at least 80%, 85%, 90%, 91%, 92%, 93%, 94%, 95%, 96%, 97%, 98%, 99% or 100% identical to the sequence of SEQ ID NO: 308:

NQKFILGLDIGITSVGYGLIDYETKNIIDAGVRLFPEANVENNEGRRSKR
GSRRLKRRRIHRLERVKKLLEDYNLLDQSQIPQSTNPYAIRVKGLSEALS
KDELVIALLHIAKRRGIHKIDVIDSNDDVGNELSTKEQLNKNSKLLKDKF
VCQIQLERMNEGQVRGEKNRFKTADIIKEIIQLLNVQKNFHQLDENFINK
YIELVEMRREYFEGPGKGSPYGWEGDPKAWYETLMGHCTYFPDELRSVKY
AYSADLFNALNDLNNLVIQRDGLSKLEYHEKYHIIENVFKQKKKPTLKQI
ANEINVNPEDIKGYRITKSGKPQFTEFKLYHDLKSVLFDQSILENEDVLD
QIAEILTIYQDKDSIKSKLTELDILLNEEDKENIAQLTGYTGTHRLSLKC
IRLVLEEQWYSSRNQMEIFTHLNIKPKKINLTAANKIPKAMIDEFILSPV
VKRTFGQAINLINKIIEKYGVPEDIIIELARENNSKDKQKFINEMQKKNE
NTRKRINEIIGKYGNQNAKRLVEKIRLHDEQEGKCLYSLESIPLEDLLNN
PNHYEVDHIIPRSVSFDNSYHNKVLVKQSENSKKSNLTPYQYFNSGKSKL
SYNQFKQHILNLSKSQDRISKKKKEYLLEERDINKFEVQKEFINRNLVDT
RYATRELTNYLKAYFSANNMNVKVKTINGSFTDYLRKVWKFKKERNHGYK
HHAEDALIIANADFLFKENKKLKAVNSVLEKPEIETKQLDIQVDSEDNYS
EMFIIPKQVQDIKDFRNFKYSHRVDKKPNRQLINDTLYSTRKKDNSTYIV
QTIKDIYAKDNTTLKKQFDKSPEKFLMYQHDPRTFEKLEVIMKQYANEKN
PLAKYHEETGEYLTKYSKKNNGPIVKSLKYIGNKLGSHLDVTHQFKSSTK
KLVKLSIKPYRFDVYLTDKGYKFITISYLDVLKKDNYYYIPEQKYDKLKL
GKAIDKNAKFIASFYKNDLIKLDGEIYKIIGVNSDTRNMIELDLPDIRYK
EYCELNNIKGEPRIKKTIGKKVNSIEKLTTDVLGNVFTNTQYTKPQLLFK
RGN

[0185] In some embodiments, the Cas protein is any of the engineered Cas proteins disclosed in Schmidt et al., 2021, Nature Communications, “Improved CRISPR genome editing using small highly active and specific engineered RNA-guided nucleases.”

[0186] In some embodiments, the Cas9 comprises an amino acid sequence that is at least 80%, 85%, 90%, 91%, 92%, 93%, 94%, 95%, 96%, 97%, 98%, 99% or 100% identical to the sequence of SEQ ID NO: 309 (designated herein as sRGN1):

MNQKFILGLDIGITSVGYGLIDYETKNIIDAGVRLFPEANVENNEGRRSK
RGSRRLKRRRIHRLDRVKHLLAEYDLLDLTNIPKSTNPYQTRVKGLNEKL
SKDELVIALLHIAKRRGIHNVDVAADKEETASDSLSTKDQINKNAKFLES
RYVCELQKERLENEGHVRGVENRFLTKDIVREAKKIIDTQMQYYPEIDET
FKEKYISLVETRREYFEGPGKGSPFGWEGNIKKWFEQMMGHCTYFPEELR
SVKYSYSAELFNALNDLNNLVITRDEDAKLNYGEKFQIIENVFKQKKTPN
LKQIAIEIGVHETEIKGYRVNKSGTPEFTEFKLYHDLKSIVFDKSILENE
AILDQIAEILTIYQDEQSIKEELNKLPEILNEQDKAEIAKLIGYNGTHRL
SLKCIHLINEELWQTSRNQMEIFNYLNIKPNKVDLSEQNKIPKDMVNDFI
LSPVVKRTFIQSINVINKVIEKYGIPEDIIIELARENNSDDRKKFINNLQ
KKNEATRKRINEIIGQTGNQNAKRIVEKIRLHDQQEGKCLYSLKDIPLED
LLRNPNNYDIDHIIPRSVSFDDSMHNKVLVRREQNAKKNNQTPYQYLTSG
YADIKYSVFKQHVLNLAENKDRMTKKKREYLLEERDINKFEVQKEFINRN
LVDTRYATRELTNYLKAYFSANNMNVKVKTINGSFTDYLRKVWKFKKERN
HGYKHHAEDALIIANADFLFKENKKLKAVNSVLEKPEIETKQLDIQVDSE
DNYSEMFIIPKQVQDIKDFRNFKYSHRVDKKPNRQLINDTLYSTRKKDNS
TYIVQTIKDIYAKDNTTLKKQFDKSPEKFLMYQHDPRTFEKLEVIMKQYA
NEKNPLAKYHEETGEYLTKYSKKNNGPIVKSLKYIGNKLGSHLDVTHQFK
SSTKKLVKLSIKPYRFDVYLTDKGYKFITISYLDVLKKDNYYYIPEQKYD
KLKLGKAIDKNAKFIASFYKNDLIKLDGEIYKIIGVNSDTRNMIELDLPD
IRYKEYCELNNIKGEPRIKKTIGKKVNSIEKLTTDVLGNVFTNTQYTKPQ
LLFKRGN.

[0187] In some embodiments, the Cas9 comprises an amino acid sequence that is at least 80%, 85%, 90%, 91%, 92%, 93%, 94%, 95%, 96%, 97%, 98%, 99% or 100% identical to the sequence of SEQ ID NO: 310 (designated herein as sRGN2):

MNQKFILGLDIGITSVGYGLIDYETKNIIDAGVRLFPEANVENNEGRRSK
RGSRRLKRRRIHRLERVKSLLSEYKIISGLAPTNNQPYNIRVKGLTEQLT
KDELAVALLHIAKRRGIHKIDVIDSNDDVGNELSTKEQLNKNSKLLKDKF
VCQIQLERMNEGQVRGEKNRFKTADIIKEIIQLLNVQKNFHQLDENFINK
YIELVEMRREYFEGPGQGSPFGWNGDLKKWYEMLMGHCTYFPQELRSVKY
AYSADLFNALNDLNNLIIQRDNSEKLEYHEKYHIIENVFKQKKKPTLKQI
AKEIGVNPEDIKGYRITKSGTPEFTEFKLYHDLKSVLFDQSILENEDVLD
QIAEILTIYQDKDSIKSKLTELDILLNEEDKENIAQLTGYNGTHRLSLKC
IRLVLEEQWYSSRNQMEIFTHLNIKPKKINLTAANKIPKAMIDEFILSPV
VKRTFIQSINVINKVIEKYGIPEDIIIELARENNSDDRKKFINNLQKKNE
ATRKRINEIIGQTGNQNAKRIVEKIRLHDQQEGKCLYSLESIALMDLLNN
PQNYEVDHIIPRSVAFDNSIHNKVLVKQIENSKKGNRTPYQYLNSSDAKL
SYNQFKQHILNLSKSKDRISKKKKDYLLEERDINKFEVQKEFINRNLVDT
RYATRELTSYLKAYFSANNMDVKVKTINGSFTNHLRKVWRFDKYRNHGYK
HHAEDALIIANADFLFKENKKLKAVNSVLEKPEIETKQLDIQVDSEDNYS
EMFIIPKQVQDIKDFRNFKYSHRVDKKPNRQLINDTLYSTRKKDNSTYIV
QTIKDIYAKDNTTLKKQFDKSPEKFLMYQHDPRTFEKLEVIMKQYANEKN
PLAKYHEETGEYLTKYSKKNNGPIVKSLKYIGNKLGSHLDVTHQFKSSTK
KLVKLSIKPYRFDVYLTDKGYKFITISYLDVLKKDNYYYIPEQKYDKLKL
GKAIDKNAKFIASFYKNDLIKLDGEIYKIIGVNSDTRNMIELDLPDIRYK
EYCELNNIKGEPRIKKTIGKKVNSIEKLTTDVLGNVFTNTQYTKPQLLFK
RGN.

[0188] In some embodiments, the Cas9 comprises an amino acid sequence that is at least 80%, 85%, 90%, 91%, 92%, 93%, 94%, 95%, 96%, 97%, 98%, 99% or 100% identical to the sequence of SEQ ID NO: 311 (designated herein as sRGN3):

MNQKFILGLDIGITSVGYGLIDYETKNIIDAGVRLFPEANVENNEGRRSK
RGSRRLKRRRIHRLERVKLLLTEYDLINKEQIPTSNNPYQIRVKGLSEIL
SKDELAIALLHLAKRRGIHNVDVAADKEETASDSLSTKDQINKNAKFLES
RYVCELQKERLENEGHVRGVENRFLTKDIVREAKKIIDTQMQYYPEIDET
FKEKYISLVETRREYFEGPGQGSPFGWNGDLKKWYEMLMGHCTYFPQELR
SVKYAYSADLFNALNDLNNLIIQRDNSEKLEYHEKYHIIENVFKQKKKPT
LKQIAKEIGVNPEDIKGYRITKSGTPEFTSFKLFHDLKKVVKDHAILDDI
DLLNQIAEILTIYQDKDSIVAELGQLEYLMSEADKQSISELTGYTGTHSL
SLKCMNMIIDELWHSSMNQMEVFTYLNMRPKKYELKGYQRIPTDMIDDAI
LSPVVKRTFIQSINVINKVIEKYGIPEDIIIELARENNSDDRKKFINNLQ
KKNEATRKRINEIIGQTGNQNAKRIVEKIRLHDQQEGKCLYSLESIPLED
LLNNPNHYEVDHIIPRSVSFDNSYHNKVLVKQSENSKKSNLTPYQYFNSG
KSKLSYNQFKQHILNLSKSQDRISKKKKEYLLEERDINKFEVQKEFINRN
LVDTRYATRELTNYLKAYFSANNMNVKVKTINGSFTDYLRKVWKFKKERN
HGYKHHAEDALIIANADFLFKENKKLKAVNSVLEKPEIETKQLDIQVDSE
DNYSEMFIIPKQVQDIKDFRNFKYSHRVDKKPNRQLINDTLYSTRKKDNS
TYIVQTIKDIYAKDNTTLKKQFDKSPEKFLMYQHDPRTFEKLEVIMKQYA
NEKNPLAKYHEETGEYLTKYSKKNNGPIVKSLKYIGNKLGSHLDVTHQFK
SSTKKLVKLSIKPYRFDVYLTDKGYKFITISYLDVLKKDNYYYIPEQKYD
KLKLGKAIDKNAKFIASFYKNDLIKLDGEIYKIIGVNSDTRNMIELDLPD
IRYKEYCELNNIKGEPRIKKTIGKKVNSIEKLTTDVLGNVFTNTQYTKPQ
LLFKRGN.

[0189] In some embodiments, the Cas9 comprises an amino acid sequence that is at least 80%, 85%, 90%, 91%, 92%, 93%, 94%, 95%, 96%, 97%, 98%, 99% or 100% identical to the sequence of SEQ ID NO: 312 (designated herein as sRGN3.1):

MNQKFILGLDIGITSVGYGLIDYETKNIIDAGVRLFPEANVENNEGRRSK
RGSRRLKRRRIHRLERVKLLLTEYDLINKEQIPTSNNPYQIRVKGLSEIL
SKDELAIALLHLAKRRGIHNVDVAADKEETASDSLSTKDQINKNAKFLES
RYVCELQKERLENEGHVRGVENRFLTKDIVREAKKIIDTQMQYYPEIDET
FKEKYISLVETRREYFEGPGQGSPFGWNGDLKKWYEMLMGHCTYFPQELR
SVKYAYSADLFNALNDLNNLIIQRDNSEKLEYHEKYHIIENVFKQKKKPT
LKQIAKEIGVNPEDIKGYRITKSGTPEFTSFKLFHDLKKVVKDHAILDDI
DLLNQIAEILTIYQDKDSIVAELGQLEYLMSEADKQSISELTGYTGTHSL
SLKCMNMIIDELWHSSMNQMEVFTYLNMRPKKYELKGYQRIPTDMIDDAI
LSPVVKRTFIQSINVINKVIEKYGIPEDIIIELARENNSDDRKKFINNLQ
KKNEATRKRINEIIGQTGNQNAKRIVEKIRLHDQQEGKCLYSLESIPLED
LLNNPNHYEVDHIIPRSVSFDNSYHNKVLVKQSENSKKSNLTPYQYFNSG
KSKLSYNQFKQHILNLSKSQDRISKKKKEYLLEERDINKFEVQKEFINRN
LVDTRYATRELTNYLKAYFSANNMNVKVKTINGSFTDYLRKVWKFKKERN
HGYKHHAEDALIIANADFLFKENKKLKAVNSVLEKPEIETKQLDIQVDSE
DNYSEMFIIPKQVQDIKDFRNFKYSHRVDKKPNRQLINDTLYSTRKKDNS
TYIVQTIKDIYAKDNTTLKKQFDKSPEKFLMYQHDPRTFEKLEVIMKQYA
NEKNPLAKYHEETGEYLTKYSKKNNGPIVKSLKYIGNKLGSHLDVTHQFK
SSTKKLVKLSIKNYRFDVYLTEKGYKFVTIAYLNVFKKDNYYYIPKDKYQ
ELKEKKKIKDTDQFIASFYKNDLIKLNGDLYKIIGVNSDDRNIIELDYYD
IKYKDYCEINNIKGEPRIKKTIGKKTESIEKFTTDVLGNLYLHSTEKAPQ
LIFKRGL.

[0190] In some embodiments, the Cas9 comprises an amino acid sequence that is at least 80%, 85%, 90%, 91%, 92%, 93%, 94%, 95%, 96%, 97%, 98%, 99% or 100% identical to the sequence of SEQ ID NO: 313 (designated herein as sRGN3.2):

MNQKFILGLDIGITSVGYGLIDYETKNIIDAGVRLFPEANVENNEGRRSK
RGSRRLKRRRIHRLERVKLLLTEYDLINKEQIPTSNNPYQIRVKGLSEIL
SKDELAIALLHLAKRRGIHNVDVAADKEETASDSLSTKDQINKNAKFLES
RYVCELQKERLENEGHVRGVENRFLTKDIVREAKKIIDTQMQYYPEIDET
FKEKYISLVETRREYFEGPGQGSPFGWNGDLKKWYEMLMGHCTYFPQELR
SVKYAYSADLFNALNDLNNLIIQRDNSEKLEYHEKYHIIENVFKQKKKPT
LKQIAKEIGVNPEDIKGYRITKSGTPEFTSFKLFHDLKKVVKDHAILDDI
DLLNQIAEILTIYQDKDSIVAELGQLEYLMSEADKQSISELTGYTGTHSL
SLKCMNMIIDELWHSSMNQMEVFTYLNMRPKKYELKGYQRIPTDMIDDAI
LSPVVKRTFIQSINVINKVIEKYGIPEDIIIELARENNSDDRKKFINNLQ
KKNEATRKRINEIIGQTGNQNAKRIVEKIRLHDQQEGKCLYSLESIPLED
LLNNPNHYEVDHIIPRSVSFDNSYHNKVLVKQSENSKKSNLTPYQYFNSG
KSKLSYNQFKQHILNLSKSQDRISKKKKEYLLEERDINKFEVQKEFINRN
LVDTRYATRELTNYLKAYFSANNMNVKVKTINGSFTDYLRKVWKFKKERN
HGYKHHAEDALIIANADFLFKENKKLKAVNSVLEKPEIETKQLDIQVDSE
DNYSEMFIIPKQVQDIKDFRNFKFSHRVDKKPNRQLINDTLYSTRMKDEH
DYIVQTITDIYGKDNTNLKKQFNKNPEKFLMYQNDPKTFEKLSIIMKQYS
DEKNPLAKYYEETGEYLTKYSKKNNGPIVKKIKLLGNKVGNHLDVTNKYE
NSTKKLVKLSIKNYRFDVYLTEKGYKFVTIAYLNVFKKDNYYYIPKDKYQ
ELKEKKKIKDTDQFIASFYKNDLIKLNGDLYKIIGVNSDDRNIIELDYYD
IKYKDYCEINNIKGEPRIKKTIGKKTESIEKFTTDVLGNLYLHSTEKAPQ
LIFKRGL.

[0191] In some embodiments, the Cas9 comprises an amino acid sequence that is at least 80%, 85%, 90%, 91%, 92%, 93%, 94%, 95%, 96%, 97%, 98%, 99% or 100% identical to the sequence of SEQ ID NO: 314 (designated herein as sRGN3.3):

MNQKFILGLDIGITSVGYGLIDYETKNIIDAGVRLFPEANVENNEGRRSK
RGSRRLKRRRIHRLERVKLLLTEYDLINKEQIPTSNNPYQIRVKGLSEIL
SKDELAIALLHLAKRRGIHNVDVAADKEETASDSLSTKDQINKNAKFLES
RYVCELQKERLENEGHVRGVENRFLTKDIVREAKKIIDTQMQYYPEIDET
FKEKYISLVETRREYFEGPGQGSPFGWNGDLKKWYEMLMGHCTYFPQELR
SVKYAYSADLFNALNDLNNLIIQRDNSEKLEYHEKYHIIENVFKQKKKPT
LKQIAKEIGVNPEDIKGYRITKSGTPEFTSFKLFHDLKKVVKDHAILDDI
DLLNQIAEILTIYQDKDSIVAELGQLEYLMSEADKQSISELTGYTGTHSL
SLKCMNMIIDELWHSSMNQMEVFTYLNMRPKKYELKGYQRIPTDMIDDAI
LSPVVKRTFIQSINVINKVIEKYGIPEDIIIELARENNSDDRKKFINNLQ
KKNEATRKRINEIIGQTGNQNAKRIVEKIRLHDQQEGKCLYSLESIPLED
LLNNPNHYEVDHIIPRSVSFDNSYHNKVLVKQSENSKKSNLTPYQYFNSG
KSKLSYNQFKQHILNLSKSQDRISKKKKEYLLEERDINKFEVQKEFINRN
LVDTRYATRELTSYLKAYFSANNMDVKVKTINGSFTNHLRKVWRFDKYRN
HGYKHHAEDALIIANADFLFKENKKLQNTNKILEKPTIENNTKKVTVEKE
EDYNNVFETPKLVEDIKQYRDYKFSHRVDKKPNRQLINDTLYSTRMKDEH
DYIVQTITDIYGKDNTNLKKQFNKNPEKFLMYQNDPKTFEKLSIIMKQYS
DEKNPLAKYYEETGEYLTKYSKKNNGPIVKKIKLLGNKVGNHLDVTNKYE
NSTKKLVKLSIKNYRFDVYLTEKGYKFVTIAYLNVFKKDNYYYIPKDKYQ
ELKEKKKIKDTDQFIASFYKNDLIKLNGDLYKIIGVNSDDRNIIELDYYD
IKYKDYCEINNIKGEPRIKKTIGKKTESIEKFTTDVLGNLYLHSTEKAPQ
LIFKRGL.

[0192] In some embodiments, the Cas9 comprises an amino acid sequence that is at least 80%, 85%, 90%, 91%, 92%, 93%, 94%, 95%, 96%, 97%, 98%, 99% or 100% identical to the sequence of SEQ ID NO: 315 (designated herein as sRGN4):

MNQKFILGLDIGITSVGYGLIDYETKNIIDAGVRLFPEANVENNEGRRSK
RGSRRLKRRRIHRLERVKKLLEDYNLLDQSQIPQSTNPYAIRVKGLSEAL
SKDELVIALLHIAKRRGIHNINVSSEDEDASNELSTKEQINRNNKLLKDK
YVCEVQLQRLKEGQIRGEKNRFKTTDILKEIDQLLKVQKDYHNLDIDFIN
QYKEIVETRREYFEGPGKGSPYGWEGDPKAWYETLMGHCTYFPDELRSVK
YAYSADLFNALNDLNNLVIQRDGLSKLEYHEKYHIIENVFKQKKKPTLKQ
IANEINVNPEDIKGYRITKSGKPEFTSFKLFHDLKKVVKDHAILDDIDLL
NQIAEILTIYQDKDSIVAELGQLEYLMSEADKQSISELTGYTGTHSLSLK
CMNMIIDELWHSSMNQMEVFTYLNMRPKKYELKGYQRIPTDMIDDAILSP
VVKRTFIQSINVINKVIEKYGIPEDIIIELARENNSDDRKKFINNLQKKN
EATRKRINEIIGQTGNQNAKRIVEKIRLHDQQEGKCLYSLESIPLEDLLN
NPNHYEVDHIIPRSVSFDNSYHNKVLVKQSENSKKSNLTPYQYFNSGKSK
LSYNQFKQHILNLSKSQDRISKKKKEYLLEERDINKFEVQKEFINRNLVD
TRYATRELTNYLKAYFSANNMNVKVKTINGSFTDYLRKVWKFKKERNHGY
KHHAEDALIIANADFLFKENKKLKAVNSVLEKPEIETKQLDIQVDSEDNY
SEMFIIPKQVQDIKDFRNFKYSHRVDKKPNRQLINDTLYSTRKKDNSTYI
VQTIKDIYAKDNTTLKKQFDKSPEKFLMYQHDPRTFEKLEVIMKQYANEK
NPLAKYHEETGEYLTKYSKKNNGPIVKSLKYIGNKLGSHLDVTHQFKSST
KKLVKLSIKPYRFDVYLTDKGYKFITISYLDVLKKDNYYYIPEQKYDKLK
LGKAIDKNAKFIASFYKNDLIKLDGEIYKIIGVNSDTRNMIELDLPDIRY
KEYCELNNIKGEPRIKKTIGKKVNSIEKLTTDVLGNVFTNTQYTKPQLLF
KRGN

[0193] In some embodiments, the guide RNAs comprise as non-limiting examples the guide sequences disclosed in Tables 1A, 1B, and Table 2 below. For example, when the AAV vector comprises SaCas9, one or more spacer sequences is selected from any one of SEQ ID NOs: 1-35, 1000-1078, and 3000-3069; or when the AAV vector comprises SluCas9, one or more spacer sequences selected from any one of SEQ ID NOs: 100-225, 2000-2116, and 4000-4251 from the tables below. Additional exemplary AAV compositions, including varieties of RNP complexes (comprising one or more guide RNAs comprising and saCas9 or sluCas9, or a mutant Cas9 protein), are disclosed elsewhere in WO2022/056000, which is incorporated herein in its entirety.

TABLE 1A
Exemplary DMD guide sequences (human-hg38.p12)

| Sequence | | | | | |
|---|---|---|---|---|---|
| ID No. | | | | | |
| of Guide | | | | | |
| Sequence | EXON | CAS9 | strand | Guide sequence | pam |
| 1 | EXON43 | SACAS9 | + | GCAATGCTGCTGTCTTCTTGCT | ATGAAT |
| 2 | EXON43 | SACAS9 | − | AACAAAATGTACAAGGACCGAC | AAGGGT |
| 3 | EXON43 | SACAS9 | − | TGCAAAGTGCAACGCCTGTGGA | AAGGGT |
| 4 | EXON43 | SACAS9 | − | ATAGTCTACAACAAAGCTCAGG | TCGGAT |
| 5 | EXON43 | SACAS9 | − | CTGTTTTAAAATTTTTATATTA | CAGAAT |
| 6 | EXON44 | SACAS9 | + | ATTTAGCATGTTCCCAATTCTC | AGGAAT |
| 7 | EXON44 | SACAS9 | + | AATCGCCTGCAGGTAAAAGCAT | ATGGAT |
| 8 | EXON44 | SACAS9 | − | TCTCAGAAAGACACAAATTCCT | GAGAAT |
| 9 | EXON45 | SACAS9 | + | TCAGGCTTCCCAATTTTTCCTG | TAGAAT |
| 10 | EXON45 | SACAS9 | + | TAGAATACTGGCATCTGTTTTT | GAGGAT |
| 11 | EXON45 | SACAS9 | + | TGGCATCTGTTTTTGAGGATTG | CTGAAT |
| 12 | EXON45 | SACAS9 | + | TTGCCGCTGCCCAATGCCATCC | TGGAGT |
| 13 | EXON45 | SACAS9 | − | GAGGTAGGGCGACAGATCTAAT | AGGAAT |
| 14 | EXON45 | SACAS9 | − | TCTACAGGAAAAATTGGGAAGC | CTGAAT |
| 15 | EXON45 | SACAS9 | − | GCGGCAAACTGTTGTCAGAACA | TTGAAT |
| 16 | EXON45 | SACAS9 | − | TTTTGGTATCTTACAGGAACTC | CAGGAT |
| 17 | EXON50 | SACAS9 | − | ACTATTGGAGCCTGTAAGTATA | CTGGAT |
| 18 | EXON50 | SACAS9 | − | AGGAAGTTAGAAGATCTGAGCT | CTGAGT |
| 19 | EXON51 | SACAS9 | + | TAGTAACCACAGGTTGTGTCAC | CAGAGT |
| 20 | EXON51 | SACAS9 | + | GTTGTGTCACCAGAGTAACAGT | CTGAGT |
| 21 | EXON51 | SACAS9 | + | TCTGAGTAGGAGCTAAAATATT | TTGGGT |
| 22 | EXON51 | SACAS9 | − | GAGGGTGATGGTGGGTGACCTT | GAGGAT |
| 23 | EXON51 | SACAS9 | − | TATAAAATCACAGAGGGTGATG | GTGGGT |
| 24 | EXON51 | SACAS9 | − | TTGATCAAGTTATAAAATCACA | GAGGGT |
| 25 | EXON53 | SACAS9 | + | CCTTGGTTTCTGTGATTTTCTT | TTGGAT |
| 26 | EXON53 | SACAS9 | + | TCCTTAGCTTCCAGCCATTGTG | TTGAAT |
| 27 | EXON53 | SACAS9 | + | CTTGTACTTCATCCCACTGATT | CTGAAT |
| 28 | EXON53 | SACAS9 | + | ACTGATTCTGAATTCTTTCAAC | TAGAAT |
| 29 | EXON53 | SACAS9 | − | AGCCAAGCTTGAGTCATGGAAG | GAGGGT |
| 30 | EXON53 | SACAS9 | − | TTAGGACAGGCCAGAGCCAAGC | TTGAGT |
| 31 | EXON53 | SACAS9 | − | GCAACAGTTGAATGAAATGTTA | AAGGAT |
| 32 | EXON53 | SACAS9 | − | CCTTCAGAACCGGAGGCAACAG | TTGAAT |
| 33 | EXON53 | SACAS9 | − | AGTTGAAAGAATTCAGAATCAG | TGGGAT |
| 34 | EXON53 | SACAS9 | − | TTTTATTCTAGTTGAAAGAATT | CAGAAT |
| 35 | EXON53 | SACAS9 | − | TTTTTCCTTTTATTCTAGTTGA | AAGAAT |
| 100 | EXON43 | SLUCAS9 | + | ATATATGTGTTACCTACCCTTG | TCGG |
| 101 | EXON43 | SLUCAS9 | + | ACATTTTGTTAACTTTTTCCCA | TTGG |
| 102 | EXON43 | SLUCAS9 | + | CTTTTTCCCATTGGAAATCAAG | CTGG |
| 103 | EXON43 | SLUCAS9 | + | TTTTTCCCATTGGAAATCAAGC | TGGG |
| 104 | EXON43 | SLUCAS9 | + | TCCTGTAGCTTCACCCTTTCCA | CAGG |
| 105 | EXON43 | SLUCAS9 | − | AATGTACAAGGACCGACAAGGG | TAGG |
| 106 | EXON43 | SLUCAS9 | − | ACAAAATGTACAAGGACCGACA | AGGG |
| 107 | EXON43 | SLUCAS9 | − | AACAAAATGTACAAGGACCGAC | AAGG |
| 108 | EXON43 | SLUCAS9 | − | GGAAAAAGTTAACAAAATGTAC | AAGG |
| 109 | EXON43 | SLUCAS9 | − | TCTCTCCCAGCTTGATTTCCAA | TGGG |
| 110 | EXON43 | SLUCAS9 | − | CTCTCTCCCAGCTTGATTTCCA | ATGG |
| 111 | EXON43 | SLUCAS9 | − | GCCTGTGGAAAGGGTGAAGCTA | CAGG |
| 112 | EXON43 | SLUCAS9 | − | GCAAAGTGCAACGCCTGTGGAA | AGGG |
| 113 | EXON43 | SLUCAS9 | − | TGCAAAGTGCAACGCCTGTGGA | AAGG |
| 114 | EXON43 | SLUCAS9 | − | AGCATTGCAAAGTGCAACGCCT | GTGG |
| 115 | EXON43 | SLUCAS9 | − | ATAGTCTACAACAAAGCTCAGG | TCGG |
| 116 | EXON43 | SLUCAS9 | − | AAAGATAGTCTACAACAAAGCT | CAGG |
| 117 | EXON44 | SLUCAS9 | + | TATTTAGCATGTTCCCAATTCT | CAGG |
| 118 | EXON44 | SLUCAS9 | + | AACAGATCTGTCAAATCGCCTG | CAGG |
| 119 | EXON44 | SLUCAS9 | + | AATCGCCTGCAGGTAAAAGCAT | ATGG |
| 120 | EXON44 | SLUCAS9 | − | TGCTAAATACAAATGGTATCTT | AAGG |
| 121 | EXON44 | SLUCAS9 | − | ATTGGGAACATGCTAAATACAA | ATGG |
| 122 | EXON44 | SLUCAS9 | − | AAAGACACAAATTCCTGAGAAT | TGGG |
| 123 | EXON44 | SLUCAS9 | − | GAAAGACACAAATTCCTGAGAA | TTGG |
| 124 | EXON44 | SLUCAS9 | − | ATGATATAAAGATATTTAATCA | GTGG |
| 125 | EXON44 | SLUCAS9 | − | TTGACAGATCTGTTGAGAAATG | GCGG |
| 126 | EXON44 | SLUCAS9 | − | GATTTGACAGATCTGTTGAGAA | ATGG |
| 127 | EXON44 | SLUCAS9 | − | TTGATCCATATGCTTTTACCTG | CAGG |
| 128 | EXON45 | SLUCAS9 | + | AGACCTCCTGCCACCGCAGATT | CAGG |
| 129 | EXON45 | SLUCAS9 | + | TCCCAATTTTTCCTGTAGAATA | CTGG |
| 130 | EXON45 | SLUCAS9 | + | TAGAATACTGGCATCTGTTTTT | GAGG |
| 131 | EXON45 | SLUCAS9 | + | TTTGCCGCTGCCCAATGCCATC | CTGG |
| 132 | EXON45 | SLUCAS9 | + | GGAGTTCCTGTAAGATACCAAA | AAGG |
| 133 | EXON45 | SLUCAS9 | − | AGAGGTAGGGCGACAGATCTAA | TAGG |
| 134 | EXON45 | SLUCAS9 | − | CTGTCAGACAGAAAAAAGAGGT | AGGG |
| 135 | EXON45 | SLUCAS9 | − | GCTGTCAGACAGAAAAAAGAGG | TAGG |
| 136 | EXON45 | SLUCAS9 | − | AACAGCTGTCAGACAGAAAAAA | GAGG |
| 137 | EXON45 | SLUCAS9 | − | AAGCCTGAATCTGCGGTGGCAG | GAGG |
| 138 | EXON45 | SLUCAS9 | − | GGGAAGCCTGAATCTGCGGTGG | CAGG |
| 139 | EXON45 | SLUCAS9 | − | AATTGGGAAGCCTGAATCTGCG | GTGG |
| 140 | EXON45 | SLUCAS9 | − | AAAAATTGGGAAGCCTGAATCT | GCGG |
| 141 | EXON45 | SLUCAS9 | − | GCCAGTATTCTACAGGAAAAAT | TGGG |
| 142 | EXON45 | SLUCAS9 | − | TGCCAGTATTCTACAGGAAAAA | TTGG |
| 143 | EXON45 | SLUCAS9 | − | AAAAACAGATGCCAGTATTCTA | CAGG |
| 144 | EXON45 | SLUCAS9 | − | TGTCAGAACATTGAATGCAACT | GGGG |
| 145 | EXON45 | SLUCAS9 | − | TTGTCAGAACATTGAATGCAAC | TGGG |
| 146 | EXON45 | SLUCAS9 | − | GTTGTCAGAACATTGAATGCAA | CTGG |
| 147 | EXON45 | SLUCAS9 | − | AACTCCAGGATGGCATTGGGCA | GCGG |
| 148 | EXON45 | SLUCAS9 | − | TACAGGAACTCCAGGATGGCAT | TGGG |
| 149 | EXON45 | SLUCAS9 | − | TTACAGGAACTCCAGGATGGCA | TTGG |
| 150 | EXON45 | SLUCAS9 | − | GGTATCTTACAGGAACTCCAGG | ATGG |
| 151 | EXON45 | SLUCAS9 | − | TTTTGGTATCTTACAGGAACTC | CAGG |
| 152 | EXON45 | SLUCAS9 | − | GTTTTGCCTTTTTGGTATCTTA | CAGG |
| 153 | EXON45 | SLUCAS9 | − | TCTTTTCTCAAATAAAAAGACA | TGGG |
| 154 | EXON50 | SLUCAS9 | + | AGAATGGGATCCAGTATACTTA | CAGG |
| 155 | EXON50 | SLUCAS9 | + | AGTATACTTACAGGCTCCAATA | GTGG |
| 156 | EXON50 | SLUCAS9 | + | CAGGCTCCAATAGTGGTCAGTC | CAGG |
| 157 | EXON50 | SLUCAS9 | + | CAATAGTGGTCAGTCCAGGAGC | TAGG |
| 158 | EXON50 | SLUCAS9 | + | GTGGTCAGTCCAGGAGCTAGGT | CAGG |
| 159 | EXON50 | SLUCAS9 | + | TTGCCCTCAGCTCTTGAAGTAA | ACGG |
| 160 | EXON50 | SLUCAS9 | − | AGTATACTGGATCCCATTCTCT | TTGG |
| 161 | EXON50 | SLUCAS9 | − | ACTATTGGAGCCTGTAAGTATA | CTGG |
| 162 | EXON50 | SLUCAS9 | − | CTAGCTCCTGGACTGACCACTA | TTGG |
| 163 | EXON50 | SLUCAS9 | − | GCAAAGCAGCCTGACCTAGCTC | CTGG |
| 164 | EXON50 | SLUCAS9 | − | AAACCGTTTACTTCAAGAGCTG | AGGG |
| 165 | EXON50 | SLUCAS9 | − | TAAACCGTTTACTTCAAGAGCT | GAGG |
| 166 | EXON50 | SLUCAS9 | − | AGATCTGAGCTCTGAGTGGAAG | GCGG |
| 167 | EXON50 | SLUCAS9 | − | AGAAGATCTGAGCTCTGAGTGG | AAGG |
| 168 | EXON50 | SLUCAS9 | − | AGTTAGAAGATCTGAGCTCTGA | GTGG |
| 169 | EXON50 | SLUCAS9 | − | ATGTGTATGCTTTTCTGTTAAA | GAGG |
| 170 | EXON51 | SLUCAS9 | + | TGATCATCTCGTTGATATCCTC | AAGG |
| 171 | EXON51 | SLUCAS9 | + | TTGATCAAGCAGAGAAAGCCAG | TCGG |
| 172 | EXON51 | SLUCAS9 | + | AGTCGGTAAGTTCTGTCCAAGC | CCGG |
| 173 | EXON51 | SLUCAS9 | + | GCCCGGTTGAAATCTGCCAGAG | CAGG |
| 174 | EXON51 | SLUCAS9 | + | CAGAGCAGGTACCTCCAACATC | AAGG |
| 175 | EXON51 | SLUCAS9 | + | GGTACCTCCAACATCAAGGAAG | ATGG |
| 176 | EXON51 | SLUCAS9 | + | CAAGGAAGATGGCATTTCTAGT | TTGG |
| 177 | EXON51 | SLUCAS9 | + | AGATGGCATTTCTAGTTTGGAG | ATGG |
| 178 | EXON51 | SLUCAS9 | + | ATGGCAGTTTCCTTAGTAACCA | CAGG |
| 179 | EXON51 | SLUCAS9 | + | GTCACCAGAGTAACAGTCTGAG | TAGG |
| 180 | EXON51 | SLUCAS9 | + | TCTGAGTAGGAGCTAAAATATT | TTGG |
| 181 | EXON51 | SLUCAS9 | + | CTGAGTAGGAGCTAAAATATTT | TGGG |
| 182 | EXON51 | SLUCAS9 | + | AAATATTTTGGGTTTTTGCAAA | AAGG |
| 183 | EXON51 | SLUCAS9 | − | GTATGAGAAAAAATGATAAAAG | TTGG |
| 184 | EXON51 | SLUCAS9 | − | CAACGAGATGATCATCAAGCAG | AAGG |
| 185 | EXON51 | SLUCAS9 | − | GAGGGTGATGGTGGGTGACCTT | GAGG |
| 186 | EXON51 | SLUCAS9 | − | ATAAAATCACAGAGGGTGATGG | TGGG |
| 187 | EXON51 | SLUCAS9 | − | TATAAAATCACAGAGGGTGATG | GTGG |
| 188 | EXON51 | SLUCAS9 | − | AGTTATAAAATCACAGAGGGTG | ATGG |
| 189 | EXON51 | SLUCAS9 | − | TGATCAAGTTATAAAATCACAG | AGGG |
| 190 | EXON51 | SLUCAS9 | − | TTGATCAAGTTATAAAATCACA | GAGG |
| 191 | EXON51 | SLUCAS9 | − | GGGCTTGGACAGAACTTACCGA | CTGG |
| 192 | EXON51 | SLUCAS9 | − | CTCTGGCAGATTTCAACCGGGC | TTGG |
| 193 | EXON51 | SLUCAS9 | − | ACCTGCTCTGGCAGATTTCAAC | CGGG |
| 194 | EXON51 | SLUCAS9 | − | TACCTGCTCTGGCAGATTTCAA | CCGG |
| 195 | EXON51 | SLUCAS9 | − | CTTGATGTTGGAGGTACCTGCT | CTGG |
| 196 | EXON51 | SLUCAS9 | − | AATGCCATCTTCCTTGATGTTG | GAGG |
| 197 | EXON51 | SLUCAS9 | − | AGAAATGCCATCTTCCTTGATG | TTGG |
| 198 | EXON51 | SLUCAS9 | − | GGTGACACAACCTGTGGTTACT | AAGG |
| 199 | EXON51 | SLUCAS9 | − | TGTTACTCTGGTGACACAACCT | GTGG |
| 200 | EXON51 | SLUCAS9 | − | AGCTCCTACTCAGACTGTTACT | CTGG |
| 201 | EXON53 | SLUCAS9 | + | AAAGGTATCTTTGATACTAACC | TTGG |
| 202 | EXON53 | SLUCAS9 | + | CCTTGGTTTCTGTGATTTTCTT | TTGG |
| 203 | EXON53 | SLUCAS9 | + | CTTTTGGATTGCATCTACTGTA | TAGG |
| 204 | EXON53 | SLUCAS9 | + | TTTTGGATTGCATCTACTGTAT | AGGG |
| 205 | EXON53 | SLUCAS9 | + | ACCCTCCTTCCATGACTCAAGC | TTGG |
| 206 | EXON53 | SLUCAS9 | + | CTTCCATGACTCAAGCTTGGCT | CTGG |
| 207 | EXON53 | SLUCAS9 | + | ACATTTCATTCAACTGTTGCCT | CCGG |
| 208 | EXON53 | SLUCAS9 | + | TCAACTGTTGCCTCCGGTTCTG | AAGG |
| 209 | EXON53 | SLUCAS9 | + | TGAATTCTTTCAACTAGAATAA | AAGG |
| 210 | EXON53 | SLUCAS9 | − | CCAAAAGAAAATCACAGAAACC | AAGG |
| 211 | EXON53 | SLUCAS9 | − | GCCAAGCTTGAGTCATGGAAGG | AGGG |
| 212 | EXON53 | SLUCAS9 | − | AGCCAAGCTTGAGTCATGGAAG | GAGG |
| 213 | EXON53 | SLUCAS9 | − | CAGAGCCAAGCTTGAGTCATGG | AAGG |
| 214 | EXON53 | SLUCAS9 | − | AGGCCAGAGCCAAGCTTGAGTC | ATGG |
| 215 | EXON53 | SLUCAS9 | − | AGAAGCTGAGCAGGTCTTAGGA | CAGG |
| 216 | EXON53 | SLUCAS9 | − | AAGGAAGAAGCTGAGCAGGTCT | TAGG |
| 217 | EXON53 | SLUCAS9 | − | GGAAGCTAAGGAAGAAGCTGAG | CAGG |
| 218 | EXON53 | SLUCAS9 | − | TTCAACACAATGGCTGGAAGCT | AAGG |
| 219 | EXON53 | SLUCAS9 | − | GTTAAAGGATTCAACACAATGG | CTGG |
| 220 | EXON53 | SLUCAS9 | − | AAATGTTAAAGGATTCAACACA | ATGG |
| 221 | EXON53 | SLUCAS9 | − | GCAACAGTTGAATGAAATGTTA | AAGG |
| 222 | EXON53 | SLUCAS9 | − | TACAAGAACACCTTCAGAACCG | GAGG |
| 223 | EXON53 | SLUCAS9 | − | AAGTACAAGAACACCTTCAGAA | CCGG |
| 224 | EXON53 | SLUCAS9 | − | AGTTGAAAGAATTCAGAATCAG | TGGG |
| 225 | EXON53 | SLUCAS9 | − | TAGTTGAAAGAATTCAGAATCA | GTGG |

TABLE 1B
Exemplary DMD guide sequences (20-nucleotides and
21-nucleotides)

| Sequence | | | | |
|---|---|---|---|---|
| ID No. | | | | |
| of Guide | | | | |
| Sequence | EXON | CAS9 | Strand | Guide sequence |
| 3000 | EXON43 | SACAS9 | + | AATGCTGCTGTCTTCTTGCT |
| 3001 | EXON43 | SACAS9 | + | CAATGCTGCTGTCTTCTTGCT |
| 1 | EXON43 | SACAS9 | + | GCAATGCTGCTGTCTTCTTGCT |
| 3002 | EXON43 | SACAS9 | − | AACAAAATGTACAAGGACCG |
| 3003 | EXON43 | SACAS9 | − | AACAAAATGTACAAGGACCGA |
| 2 | EXON43 | SACAS9 | − | AACAAAATGTACAAGGACCGAC |
| 3004 | EXON43 | SACAS9 | − | TGCAAAGTGCAACGCCTGTG |
| 3005 | EXON43 | SACAS9 | − | TGCAAAGTGCAACGCCTGTGG |
| 3 | EXON43 | SACAS9 | − | TGCAAAGTGCAACGCCTGTGGA |
| 3006 | EXON43 | SACAS9 | − | ATAGTCTACAACAAAGCTCA |
| 3007 | EXON43 | SACAS9 | − | ATAGTCTACAACAAAGCTCAG |
| 4 | EXON43 | SACAS9 | − | ATAGTCTACAACAAAGCTCAGG |
| 3008 | EXON43 | SACAS9 | − | CTGTTTTAAAATTTTTATAT |
| 3009 | EXON43 | SACAS9 | − | CTGTTTTAAAATTTTTATATT |
| 5 | EXON43 | SACAS9 | − | CTGTTTTAAAATTTTTATATTA |
| 3010 | EXON44 | SACAS9 | + | TTAGCATGTTCCCAATTCTC |
| 3011 | EXON44 | SACAS9 | + | TTTAGCATGTTCCCAATTCTC |
| 6 | EXON44 | SACAS9 | + | ATTTAGCATGTTCCCAATTCTC |
| 3012 | EXON44 | SACAS9 | + | TCGCCTGCAGGTAAAAGCAT |
| 3013 | EXON44 | SACAS9 | + | ATCGCCTGCAGGTAAAAGCAT |
| 7 | EXON44 | SACAS9 | + | AATCGCCTGCAGGTAAAAGCAT |
| 3014 | EXON44 | SACAS9 | − | TCTCAGAAAGACACAAATTC |
| 3015 | EXON44 | SACAS9 | − | TCTCAGAAAGACACAAATTCC |
| 8 | EXON44 | SACAS9 | − | TCTCAGAAAGACACAAATTCCT |
| 3016 | EXON45 | SACAS9 | + | AGGCTTCCCAATTTTTCCTG |
| 3017 | EXON45 | SACAS9 | + | CAGGCTTCCCAATTTTTCCTG |
| 9 | EXON45 | SACAS9 | + | TCAGGCTTCCCAATTTTTCCTG |
| 3018 | EXON45 | SACAS9 | + | GAATACTGGCATCTGTTTTT |
| 3019 | EXON45 | SACAS9 | + | AGAATACTGGCATCTGTTTTT |
| 10 | EXON45 | SACAS9 | + | TAGAATACTGGCATCTGTTTTT |
| 3020 | EXON45 | SACAS9 | + | GCATCTGTTTTTGAGGATTG |
| 3021 | EXON45 | SACAS9 | + | GGCATCTGTTTTTGAGGATTG |
| 11 | EXON45 | SACAS9 | + | TGGCATCTGTTTTTGAGGATTG |
| 3022 | EXON45 | SACAS9 | + | GCCGCTGCCCAATGCCATCC |
| 3023 | EXON45 | SACAS9 | + | TGCCGCTGCCCAATGCCATCC |
| 12 | EXON45 | SACAS9 | + | TTGCCGCTGCCCAATGCCATCC |
| 3024 | EXON45 | SACAS9 | − | GAGGTAGGGCGACAGATCTA |
| 3025 | EXON45 | SACAS9 | − | GAGGTAGGGCGACAGATCTAA |
| 13 | EXON45 | SACAS9 | − | GAGGTAGGGCGACAGATCTAAT |
| 3026 | EXON45 | SACAS9 | − | TCTACAGGAAAAATTGGGAA |
| 3027 | EXON45 | SACAS9 | − | TCTACAGGAAAAATTGGGAAG |
| 14 | EXON45 | SACAS9 | − | TCTACAGGAAAAATTGGGAAGC |
| 3028 | EXON45 | SACAS9 | − | GCGGCAAACTGTTGTCAGAA |
| 3029 | EXON45 | SACAS9 | − | GCGGCAAACTGTTGTCAGAAC |
| 15 | EXON45 | SACAS9 | − | GCGGCAAACTGTTGTCAGAACA |
| 3030 | EXON45 | SACAS9 | − | TTTTGGTATCTTACAGGAAC |
| 3031 | EXON45 | SACAS9 | − | TTTTGGTATCTTACAGGAACT |
| 16 | EXON45 | SACAS9 | − | TTTTGGTATCTTACAGGAACTC |
| 3032 | EXON50 | SACAS9 | − | ACTATTGGAGCCTGTAAGTA |
| 3033 | EXON50 | SACAS9 | − | ACTATTGGAGCCTGTAAGTAT |
| 17 | EXON50 | SACAS9 | − | ACTATTGGAGCCTGTAAGTATA |
| 3034 | EXON50 | SACAS9 | − | AGGAAGTTAGAAGATCTGAG |
| 3035 | EXON50 | SACAS9 | − | AGGAAGTTAGAAGATCTGAGC |
| 18 | EXON50 | SACAS9 | − | AGGAAGTTAGAAGATCTGAGCT |
| 3036 | EXON51 | SACAS9 | + | GTAACCACAGGTTGTGTCAC |
| 3037 | EXON51 | SACAS9 | + | AGTAACCACAGGTTGTGTCAC |
| 19 | EXON51 | SACAS9 | + | TAGTAACCACAGGTTGTGTCAC |
| 3038 | EXON51 | SACAS9 | + | TGTGTCACCAGAGTAACAGT |
| 3039 | EXON51 | SACAS9 | + | TTGTGTCACCAGAGTAACAGT |
| 20 | EXON51 | SACAS9 | + | GTTGTGTCACCAGAGTAACAGT |
| 3040 | EXON51 | SACAS9 | + | TGAGTAGGAGCTAAAATATT |
| 3041 | EXON51 | SACAS9 | + | CTGAGTAGGAGCTAAAATATT |
| 21 | EXON51 | SACAS9 | + | TCTGAGTAGGAGCTAAAATATT |
| 3042 | EXON51 | SACAS9 | − | GAGGGTGATGGTGGGTGACC |
| 3043 | EXON51 | SACAS9 | − | GAGGGTGATGGTGGGTGACCT |
| 22 | EXON51 | SACAS9 | − | GAGGGTGATGGTGGGTGACCTT |
| 3044 | EXON51 | SACAS9 | − | TATAAAATCACAGAGGGTGA |
| 3045 | EXON51 | SACAS9 | − | TATAAAATCACAGAGGGTGAT |
| 23 | EXON51 | SACAS9 | − | TATAAAATCACAGAGGGTGATG |
| 3046 | EXON51 | SACAS9 | − | TTGATCAAGTTATAAAATCA |
| 3047 | EXON51 | SACAS9 | − | TTGATCAAGTTATAAAATCAC |
| 24 | EXON51 | SACAS9 | − | TTGATCAAGTTATAAAATCACA |
| 3048 | EXON53 | SACAS9 | + | TTGGTTTCTGTGATTTTCTT |
| 3049 | EXON53 | SACAS9 | + | CTTGGTTTCTGTGATTTTCTT |
| 25 | EXON53 | SACAS9 | + | CCTTGGTTTCTGTGATTTTCTT |
| 3050 | EXON53 | SACAS9 | + | CTTAGCTTCCAGCCATTGTG |
| 3051 | EXON53 | SACAS9 | + | CCTTAGCTTCCAGCCATTGTG |
| 26 | EXON53 | SACAS9 | + | TCCTTAGCTTCCAGCCATTGTG |
| 3052 | EXON53 | SACAS9 | + | TGTACTTCATCCCACTGATT |
| 3053 | EXON53 | SACAS9 | + | TTGTACTTCATCCCACTGATT |
| 27 | EXON53 | SACAS9 | + | CTTGTACTTCATCCCACTGATT |
| 3054 | EXON53 | SACAS9 | + | TGATTCTGAATTCTTTCAAC |
| 3055 | EXON53 | SACAS9 | + | CTGATTCTGAATTCTTTCAAC |
| 28 | EXON53 | SACAS9 | + | ACTGATTCTGAATTCTTTCAAC |
| 3056 | EXON53 | SACAS9 | − | AGCCAAGCTTGAGTCATGGA |
| 3057 | EXON53 | SACAS9 | − | AGCCAAGCTTGAGTCATGGAA |
| 29 | EXON53 | SACAS9 | − | AGCCAAGCTTGAGTCATGGAAG |
| 3058 | EXON53 | SACAS9 | − | TTAGGACAGGCCAGAGCCAA |
| 3059 | EXON53 | SACAS9 | − | TTAGGACAGGCCAGAGCCAAG |
| 30 | EXON53 | SACAS9 | − | TTAGGACAGGCCAGAGCCAAGC |
| 3060 | EXON53 | SACAS9 | − | GCAACAGTTGAATGAAATGT |
| 3061 | EXON53 | SACAS9 | − | GCAACAGTTGAATGAAATGTT |
| 31 | EXON53 | SACAS9 | − | GCAACAGTTGAATGAAATGTTA |
| 3062 | EXON53 | SACAS9 | − | CCTTCAGAACCGGAGGCAAC |
| 3063 | EXON53 | SACAS9 | − | CCTTCAGAACCGGAGGCAACA |
| 32 | EXON53 | SACAS9 | − | CCTTCAGAACCGGAGGCAACAG |
| 3064 | EXON53 | SACAS9 | − | AGTTGAAAGAATTCAGAATC |
| 3065 | EXON53 | SACAS9 | − | AGTTGAAAGAATTCAGAATCA |
| 33 | EXON53 | SACAS9 | − | AGTTGAAAGAATTCAGAATCAG |
| 3066 | EXON53 | SACAS9 | − | TTTTATTCTAGTTGAAAGAA |
| 3067 | EXON53 | SACAS9 | − | TTTTATTCTAGTTGAAAGAAT |
| 34 | EXON53 | SACAS9 | − | TTTTATTCTAGTTGAAAGAATT |
| 3068 | EXON53 | SACAS9 | − | TTTTTCCTTTTATTCTAGTT |
| 3069 | EXON53 | SACAS9 | − | TTTTTCCTTTTATTCTAGTTG |
| 35 | EXON53 | SACAS9 | − | TTTTTCCTTTTATTCTAGTTGA |
| 4000 | EXON43 | SLUCAS9 | + | ATATGTGTTACCTACCCTTG |
| 4001 | EXON43 | SLUCAS9 | + | TATATGTGTTACCTACCCTTG |
| 100 | EXON43 | SLUCAS9 | + | ATATATGTGTTACCTACCCTTG |
| 4002 | EXON43 | SLUCAS9 | + | ATTTTGTTAACTTTTTCCCA |
| 4003 | EXON43 | SLUCAS9 | + | CATTTTGTTAACTTTTTCCCA |
| 101 | EXON43 | SLUCAS9 | + | ACATTTTGTTAACTTTTTCCCA |
| 4004 | EXON43 | SLUCAS9 | + | TTTTCCCATTGGAAATCAAG |
| 4005 | EXON43 | SLUCAS9 | + | TTTTTCCCATTGGAAATCAAG |
| 102 | EXON43 | SLUCAS9 | + | CTTTTTCCCATTGGAAATCAAG |
| 4006 | EXON43 | SLUCAS9 | + | TTTCCCATTGGAAATCAAGC |
| 4007 | EXON43 | SLUCAS9 | + | TTTTCCCATTGGAAATCAAGC |
| 103 | EXON43 | SLUCAS9 | + | TTTTTCCCATTGGAAATCAAGC |
| 4008 | EXON43 | SLUCAS9 | + | CTGTAGCTTCACCCTTTCCA |
| 4009 | EXON43 | SLUCAS9 | + | CCTGTAGCTTCACCCTTTCCA |
| 104 | EXON43 | SLUCAS9 | + | TCCTGTAGCTTCACCCTTTCCA |
| 4010 | EXON43 | SLUCAS9 | − | AATGTACAAGGACCGACAAG |
| 4011 | EXON43 | SLUCAS9 | − | AATGTACAAGGACCGACAAGG |
| 105 | EXON43 | SLUCAS9 | − | AATGTACAAGGACCGACAAGGG |
| 4012 | EXON43 | SLUCAS9 | − | ACAAAATGTACAAGGACCGA |
| 4013 | EXON43 | SLUCAS9 | − | ACAAAATGTACAAGGACCGAC |
| 106 | EXON43 | SLUCAS9 | − | ACAAAATGTACAAGGACCGACA |
| 4014 | EXON43 | SLUCAS9 | − | AACAAAATGTACAAGGACCG |
| 4015 | EXON43 | SLUCAS9 | − | AACAAAATGTACAAGGACCGA |
| 107 | EXON43 | SLUCAS9 | − | AACAAAATGTACAAGGACCGAC |
| 4016 | EXON43 | SLUCAS9 | − | GGAAAAAGTTAACAAAATGT |
| 4017 | EXON43 | SLUCAS9 | − | GGAAAAAGTTAACAAAATGTA |
| 108 | EXON43 | SLUCAS9 | − | GGAAAAAGTTAACAAAATGTAC |
| 4018 | EXON43 | SLUCAS9 | − | TCTCTCCCAGCTTGATTTCC |
| 4019 | EXON43 | SLUCAS9 | − | TCTCTCCCAGCTTGATTTCCA |
| 109 | EXON43 | SLUCAS9 | − | TCTCTCCCAGCTTGATTTCCAA |
| 4020 | EXON43 | SLUCAS9 | − | CTCTCTCCCAGCTTGATTTC |
| 4021 | EXON43 | SLUCAS9 | − | CTCTCTCCCAGCTTGATTTCC |
| 110 | EXON43 | SLUCAS9 | − | CTCTCTCCCAGCTTGATTTCCA |
| 4022 | EXON43 | SLUCAS9 | − | GCCTGTGGAAAGGGTGAAGC |
| 4023 | EXON43 | SLUCAS9 | − | GCCTGTGGAAAGGGTGAAGCT |
| 111 | EXON43 | SLUCAS9 | − | GCCTGTGGAAAGGGTGAAGCTA |
| 4024 | EXON43 | SLUCAS9 | − | GCAAAGTGCAACGCCTGTGG |
| 4025 | EXON43 | SLUCAS9 | − | GCAAAGTGCAACGCCTGTGGA |
| 112 | EXON43 | SLUCAS9 | − | GCAAAGTGCAACGCCTGTGGAA |
| 4026 | EXON43 | SLUCAS9 | − | TGCAAAGTGCAACGCCTGTG |
| 4027 | EXON43 | SLUCAS9 | − | TGCAAAGTGCAACGCCTGTGG |
| 113 | EXON43 | SLUCAS9 | − | TGCAAAGTGCAACGCCTGTGGA |
| 4028 | EXON43 | SLUCAS9 | − | AGCATTGCAAAGTGCAACGC |
| 4029 | EXON43 | SLUCAS9 | − | AGCATTGCAAAGTGCAACGCC |
| 114 | EXON43 | SLUCAS9 | − | AGCATTGCAAAGTGCAACGCCT |
| 4030 | EXON43 | SLUCAS9 | − | ATAGTCTACAACAAAGCTCA |
| 4031 | EXON43 | SLUCAS9 | − | ATAGTCTACAACAAAGCTCAG |
| 115 | EXON43 | SLUCAS9 | − | ATAGTCTACAACAAAGCTCAGG |
| 4032 | EXON43 | SLUCAS9 | − | AAAGATAGTCTACAACAAAG |
| 4033 | EXON43 | SLUCAS9 | − | AAAGATAGTCTACAACAAAGC |
| 116 | EXON43 | SLUCAS9 | − | AAAGATAGTCTACAACAAAGCT |
| 4034 | EXON44 | SLUCAS9 | + | TTTAGCATGTTCCCAATTCT |
| 4035 | EXON44 | SLUCAS9 | + | ATTTAGCATGTTCCCAATTCT |
| 117 | EXON44 | SLUCAS9 | + | TATTTAGCATGTTCCCAATTCT |
| 4036 | EXON44 | SLUCAS9 | + | CAGATCTGTCAAATCGCCTG |
| 4037 | EXON44 | SLUCAS9 | + | ACAGATCTGTCAAATCGCCTG |
| 118 | EXON44 | SLUCAS9 | + | AACAGATCTGTCAAATCGCCTG |
| 4038 | EXON44 | SLUCAS9 | + | TCGCCTGCAGGTAAAAGCAT |
| 4039 | EXON44 | SLUCAS9 | + | ATCGCCTGCAGGTAAAAGCAT |
| 119 | EXON44 | SLUCAS9 | + | AATCGCCTGCAGGTAAAAGCAT |
| 4040 | EXON44 | SLUCAS9 | − | TGCTAAATACAAATGGTATC |
| 4041 | EXON44 | SLUCAS9 | − | TGCTAAATACAAATGGTATCT |
| 120 | EXON44 | SLUCAS9 | − | TGCTAAATACAAATGGTATCTT |
| 4042 | EXON44 | SLUCAS9 | − | ATTGGGAACATGCTAAATAC |
| 4043 | EXON44 | SLUCAS9 | − | ATTGGGAACATGCTAAATACA |
| 121 | EXON44 | SLUCAS9 | − | ATTGGGAACATGCTAAATACAA |
| 4044 | EXON44 | SLUCAS9 | − | AAAGACACAAATTCCTGAGA |
| 4045 | EXON44 | SLUCAS9 | − | AAAGACACAAATTCCTGAGAA |
| 122 | EXON44 | SLUCAS9 | − | AAAGACACAAATTCCTGAGAAT |
| 4046 | EXON44 | SLUCAS9 | − | GAAAGACACAAATTCCTGAG |
| 4047 | EXON44 | SLUCAS9 | − | GAAAGACACAAATTCCTGAGA |
| 123 | EXON44 | SLUCAS9 | − | GAAAGACACAAATTCCTGAGAA |
| 4048 | EXON44 | SLUCAS9 | − | ATGATATAAAGATATTTAAT |
| 4049 | EXON44 | SLUCAS9 | − | ATGATATAAAGATATTTAATC |
| 124 | EXON44 | SLUCAS9 | − | ATGATATAAAGATATTTAATCA |
| 4050 | EXON44 | SLUCAS9 | − | TTGACAGATCTGTTGAGAAA |
| 4051 | EXON44 | SLUCAS9 | − | TTGACAGATCTGTTGAGAAAT |
| 125 | EXON44 | SLUCAS9 | − | TTGACAGATCTGTTGAGAAATG |
| 4052 | EXON44 | SLUCAS9 | − | GATTTGACAGATCTGTTGAG |
| 4053 | EXON44 | SLUCAS9 | − | GATTTGACAGATCTGTTGAGA |
| 126 | EXON44 | SLUCAS9 | − | GATTTGACAGATCTGTTGAGAA |
| 4054 | EXON44 | SLUCAS9 | − | TTGATCCATATGCTTTTACC |
| 4055 | EXON44 | SLUCAS9 | − | TTGATCCATATGCTTTTACCT |
| 127 | EXON44 | SLUCAS9 | − | TTGATCCATATGCTTTTACCTG |
| 4056 | EXON45 | SLUCAS9 | + | ACCTCCTGCCACCGCAGATT |
| 4057 | EXON45 | SLUCAS9 | + | GACCTCCTGCCACCGCAGATT |
| 128 | EXON45 | SLUCAS9 | + | AGACCTCCTGCCACCGCAGATT |
| 4058 | EXON45 | SLUCAS9 | + | CCAATTTTTCCTGTAGAATA |
| 4059 | EXON45 | SLUCAS9 | + | CCCAATTTTTCCTGTAGAATA |
| 129 | EXON45 | SLUCAS9 | + | TCCCAATTTTTCCTGTAGAATA |
| 4060 | EXON45 | SLUCAS9 | + | GAATACTGGCATCTGTTTTT |
| 4061 | EXON45 | SLUCAS9 | + | AGAATACTGGCATCTGTTTTT |
| 130 | EXON45 | SLUCAS9 | + | TAGAATACTGGCATCTGTTTTT |
| 4062 | EXON45 | SLUCAS9 | + | TGCCGCTGCCCAATGCCATC |
| 4063 | EXON45 | SLUCAS9 | + | TTGCCGCTGCCCAATGCCATC |
| 131 | EXON45 | SLUCAS9 | + | TTTGCCGCTGCCCAATGCCATC |
| 4064 | EXON45 | SLUCAS9 | + | AGTTCCTGTAAGATACCAAA |
| 4065 | EXON45 | SLUCAS9 | + | GAGTTCCTGTAAGATACCAAA |
| 132 | EXON45 | SLUCAS9 | + | GGAGTTCCTGTAAGATACCAAA |
| 4066 | EXON45 | SLUCAS9 | − | AGAGGTAGGGCGACAGATCT |
| 4067 | EXON45 | SLUCAS9 | − | AGAGGTAGGGCGACAGATCTA |
| 133 | EXON45 | SLUCAS9 | − | AGAGGTAGGGCGACAGATCTAA |
| 4068 | EXON45 | SLUCAS9 | − | CTGTCAGACAGAAAAAAGAG |
| 4069 | EXON45 | SLUCAS9 | − | CTGTCAGACAGAAAAAAGAGG |
| 134 | EXON45 | SLUCAS9 | − | CTGTCAGACAGAAAAAAGAGGT |
| 4070 | EXON45 | SLUCAS9 | − | GCTGTCAGACAGAAAAAAGA |
| 4071 | EXON45 | SLUCAS9 | − | GCTGTCAGACAGAAAAAAGAG |
| 135 | EXON45 | SLUCAS9 | − | GCTGTCAGACAGAAAAAAGAGG |
| 4072 | EXON45 | SLUCAS9 | − | AACAGCTGTCAGACAGAAAA |
| 4073 | EXON45 | SLUCAS9 | − | AACAGCTGTCAGACAGAAAAA |
| 136 | EXON45 | SLUCAS9 | − | AACAGCTGTCAGACAGAAAAAA |
| 4074 | EXON45 | SLUCAS9 | − | AAGCCTGAATCTGCGGTGGC |
| 4075 | EXON45 | SLUCAS9 | − | AAGCCTGAATCTGCGGTGGCA |
| 137 | EXON45 | SLUCAS9 | − | AAGCCTGAATCTGCGGTGGCAG |
| 4076 | EXON45 | SLUCAS9 | − | GGGAAGCCTGAATCTGCGGT |
| 4077 | EXON45 | SLUCAS9 | − | GGGAAGCCTGAATCTGCGGTG |
| 138 | EXON45 | SLUCAS9 | − | GGGAAGCCTGAATCTGCGGTGG |
| 4078 | EXON45 | SLUCAS9 | − | AATTGGGAAGCCTGAATCTG |
| 4079 | EXON45 | SLUCAS9 | − | AATTGGGAAGCCTGAATCTGC |
| 139 | EXON45 | SLUCAS9 | − | AATTGGGAAGCCTGAATCTGCG |
| 4080 | EXON45 | SLUCAS9 | − | AAAAATTGGGAAGCCTGAAT |
| 4081 | EXON45 | SLUCAS9 | − | AAAAATTGGGAAGCCTGAATC |
| 140 | EXON45 | SLUCAS9 | − | AAAAATTGGGAAGCCTGAATCT |
| 4082 | EXON45 | SLUCAS9 | − | GCCAGTATTCTACAGGAAAA |
| 4083 | EXON45 | SLUCAS9 | | GCCAGTATTCTACAGGAAAAA |
| 141 | EXON45 | SLUCAS9 | − | GCCAGTATTCTACAGGAAAAAT |
| 4084 | EXON45 | SLUCAS9 | − | TGCCAGTATTCTACAGGAAA |
| 4085 | EXON45 | SLUCAS9 | − | TGCCAGTATTCTACAGGAAAA |
| 142 | EXON45 | SLUCAS9 | − | TGCCAGTATTCTACAGGAAAAA |
| 4086 | EXON45 | SLUCAS9 | − | AAAAACAGATGCCAGTATTC |
| 4087 | EXON45 | SLUCAS9 | − | AAAAACAGATGCCAGTATTCT |
| 143 | EXON45 | SLUCAS9 | − | AAAAACAGATGCCAGTATTCTA |
| 4088 | EXON45 | SLUCAS9 | − | TGTCAGAACATTGAATGCAA |
| 4089 | EXON45 | SLUCAS9 | − | TGTCAGAACATTGAATGCAAC |
| 144 | EXON45 | SLUCAS9 | − | TGTCAGAACATTGAATGCAACT |
| 4090 | EXON45 | SLUCAS9 | − | TTGTCAGAACATTGAATGCA |
| 4091 | EXON45 | SLUCAS9 | − | TTGTCAGAACATTGAATGCAA |
| 145 | EXON45 | SLUCAS9 | − | TTGTCAGAACATTGAATGCAAC |
| 4092 | EXON45 | SLUCAS9 | − | GTTGTCAGAACATTGAATGC |
| 4093 | EXON45 | SLUCAS9 | − | GTTGTCAGAACATTGAATGCA |
| 146 | EXON45 | SLUCAS9 | − | GTTGTCAGAACATTGAATGCAA |
| 4094 | EXON45 | SLUCAS9 | − | AACTCCAGGATGGCATTGGG |
| 4095 | EXON45 | SLUCAS9 | − | AACTCCAGGATGGCATTGGGC |
| 147 | EXON45 | SLUCAS9 | − | AACTCCAGGATGGCATTGGGCA |
| 4096 | EXON45 | SLUCAS9 | − | TACAGGAACTCCAGGATGGC |
| 4097 | EXON45 | SLUCAS9 | − | TACAGGAACTCCAGGATGGCA |
| 148 | EXON45 | SLUCAS9 | − | TACAGGAACTCCAGGATGGCAT |
| 4098 | EXON45 | SLUCAS9 | − | TTACAGGAACTCCAGGATGG |
| 4099 | EXON45 | SLUCAS9 | − | TTACAGGAACTCCAGGATGGC |
| 149 | EXON45 | SLUCAS9 | − | TTACAGGAACTCCAGGATGGCA |
| 4100 | EXON45 | SLUCAS9 | − | GGTATCTTACAGGAACTCCA |
| 4101 | EXON45 | SLUCAS9 | − | GGTATCTTACAGGAACTCCAG |
| 150 | EXON45 | SLUCAS9 | − | GGTATCTTACAGGAACTCCAGG |
| 4102 | EXON45 | SLUCAS9 | − | TTTTGGTATCTTACAGGAAC |
| 4103 | EXON45 | SLUCAS9 | − | TTTTGGTATCTTACAGGAACT |
| 151 | EXON45 | SLUCAS9 | − | TTTTGGTATCTTACAGGAACTC |
| 4104 | EXON45 | SLUCAS9 | − | GTTTTGCCTTTTTGGTATCT |
| 4105 | EXON45 | SLUCAS9 | − | GTTTTGCCTTTTTGGTATCTT |
| 152 | EXON45 | SLUCAS9 | − | GTTTTGCCTTTTTGGTATCTTA |
| 4106 | EXON45 | SLUCAS9 | − | TCTTTTCTCAAATAAAAAGA |
| 4107 | EXON45 | SLUCAS9 | − | TCTTTTCTCAAATAAAAAGAC |
| 153 | EXON45 | SLUCAS9 | − | TCTTTTCTCAAATAAAAAGACA |
| 4108 | EXON50 | SLUCAS9 | + | AATGGGATCCAGTATACTTA |
| 4109 | EXON50 | SLUCAS9 | + | GAATGGGATCCAGTATACTTA |
| 154 | EXON50 | SLUCAS9 | + | AGAATGGGATCCAGTATACTTA |
| 4110 | EXON50 | SLUCAS9 | + | TATACTTACAGGCTCCAATA |
| 4111 | EXON50 | SLUCAS9 | + | GTATACTTACAGGCTCCAATA |
| 155 | EXON50 | SLUCAS9 | + | AGTATACTTACAGGCTCCAATA |
| 4112 | EXON50 | SLUCAS9 | + | GGCTCCAATAGTGGTCAGTC |
| 4113 | EXON50 | SLUCAS9 | + | AGGCTCCAATAGTGGTCAGTC |
| 156 | EXON50 | SLUCAS9 | + | CAGGCTCCAATAGTGGTCAGTC |
| 4114 | EXON50 | SLUCAS9 | + | ATAGTGGTCAGTCCAGGAGC |
| 4115 | EXON50 | SLUCAS9 | + | AATAGTGGTCAGTCCAGGAGC |
| 157 | EXON50 | SLUCAS9 | + | CAATAGTGGTCAGTCCAGGAGC |
| 4116 | EXON50 | SLUCAS9 | + | GGTCAGTCCAGGAGCTAGGT |
| 4117 | EXON50 | SLUCAS9 | + | TGGTCAGTCCAGGAGCTAGGT |
| 158 | EXON50 | SLUCAS9 | + | GTGGTCAGTCCAGGAGCTAGGT |
| 4118 | EXON50 | SLUCAS9 | + | GCCCTCAGCTCTTGAAGTAA |
| 4119 | EXON50 | SLUCAS9 | + | TGCCCTCAGCTCTTGAAGTAA |
| 159 | EXON50 | SLUCAS9 | + | TTGCCCTCAGCTCTTGAAGTAA |
| 4120 | EXON50 | SLUCAS9 | − | AGTATACTGGATCCCATTCT |
| 4121 | EXON50 | SLUCAS9 | − | AGTATACTGGATCCCATTCTC |
| 160 | EXON50 | SLUCAS9 | − | AGTATACTGGATCCCATTCTCT |
| 4122 | EXON50 | SLUCAS9 | − | ACTATTGGAGCCTGTAAGTA |
| 4123 | EXON50 | SLUCAS9 | − | ACTATTGGAGCCTGTAAGTAT |
| 161 | EXON50 | SLUCAS9 | − | ACTATTGGAGCCTGTAAGTATA |
| 4124 | EXON50 | SLUCAS9 | − | CTAGCTCCTGGACTGACCAC |
| 4125 | EXON50 | SLUCAS9 | − | CTAGCTCCTGGACTGACCACT |
| 162 | EXON50 | SLUCAS9 | − | CTAGCTCCTGGACTGACCACTA |
| 4126 | EXON50 | SLUCAS9 | − | GCAAAGCAGCCTGACCTAGC |
| 4127 | EXON50 | SLUCAS9 | − | GCAAAGCAGCCTGACCTAGCT |
| 163 | EXON50 | SLUCAS9 | − | GCAAAGCAGCCTGACCTAGCTC |
| 4128 | EXON50 | SLUCAS9 | − | AAACCGTTTACTTCAAGAGC |
| 4129 | EXON50 | SLUCAS9 | − | AAACCGTTTACTTCAAGAGCT |
| 164 | EXON50 | SLUCAS9 | − | AAACCGTTTACTTCAAGAGCTG |
| 4130 | EXON50 | SLUCAS9 | − | TAAACCGTTTACTTCAAGAG |
| 4131 | EXON50 | SLUCAS9 | − | TAAACCGTTTACTTCAAGAGC |
| 165 | EXON50 | SLUCAS9 | − | TAAACCGTTTACTTCAAGAGCT |
| 4132 | EXON50 | SLUCAS9 | − | AGATCTGAGCTCTGAGTGGA |
| 4133 | EXON50 | SLUCAS9 | − | AGATCTGAGCTCTGAGTGGAA |
| 166 | EXON50 | SLUCAS9 | − | AGATCTGAGCTCTGAGTGGAAG |
| 4134 | EXON50 | SLUCAS9 | − | AGAAGATCTGAGCTCTGAGT |
| 4135 | EXON50 | SLUCAS9 | − | AGAAGATCTGAGCTCTGAGTG |
| 167 | EXON50 | SLUCAS9 | − | AGAAGATCTGAGCTCTGAGTGG |
| 4136 | EXON50 | SLUCAS9 | − | AGTTAGAAGATCTGAGCTCT |
| 4137 | EXON50 | SLUCAS9 | − | AGTTAGAAGATCTGAGCTCTG |
| 168 | EXON50 | SLUCAS9 | − | AGTTAGAAGATCTGAGCTCTGA |
| 4138 | EXON50 | SLUCAS9 | − | ATGTGTATGCTTTTCTGTTA |
| 4139 | EXON50 | SLUCAS9 | − | ATGTGTATGCTTTTCTGTTAA |
| 169 | EXON50 | SLUCAS9 | − | ATGTGTATGCTTTTCTGTTAAA |
| 4140 | EXON51 | SLUCAS9 | + | ATCATCTCGTTGATATCCTC |
| 4141 | EXON51 | SLUCAS9 | + | GATCATCTCGTTGATATCCTC |
| 170 | EXON51 | SLUCAS9 | + | TGATCATCTCGTTGATATCCTC |
| 4142 | EXON51 | SLUCAS9 | + | GATCAAGCAGAGAAAGCCAG |
| 4143 | EXON51 | SLUCAS9 | + | TGATCAAGCAGAGAAAGCCAG |
| 171 | EXON51 | SLUCAS9 | + | TTGATCAAGCAGAGAAAGCCAG |
| 4144 | EXON51 | SLUCAS9 | + | TCGGTAAGTTCTGTCCAAGC |
| 4145 | EXON51 | SLUCAS9 | + | GTCGGTAAGTTCTGTCCAAGC |
| 172 | EXON51 | SLUCAS9 | + | AGTCGGTAAGTTCTGTCCAAGC |
| 4146 | EXON51 | SLUCAS9 | + | CCGGTTGAAATCTGCCAGAG |
| 4147 | EXON51 | SLUCAS9 | + | CCCGGTTGAAATCTGCCAGAG |
| 173 | EXON51 | SLUCAS9 | + | GCCCGGTTGAAATCTGCCAGAG |
| 4148 | EXON51 | SLUCAS9 | + | GAGCAGGTACCTCCAACATC |
| 4149 | EXON51 | SLUCAS9 | + | AGAGCAGGTACCTCCAACATC |
| 174 | EXON51 | SLUCAS9 | + | CAGAGCAGGTACCTCCAACATC |
| 4150 | EXON51 | SLUCAS9 | + | TACCTCCAACATCAAGGAAG |
| 4151 | EXON51 | SLUCAS9 | + | GTACCTCCAACATCAAGGAAG |
| 175 | EXON51 | SLUCAS9 | + | GGTACCTCCAACATCAAGGAAG |
| 4152 | EXON51 | SLUCAS9 | + | AGGAAGATGGCATTTCTAGT |
| 4153 | EXON51 | SLUCAS9 | + | AAGGAAGATGGCATTTCTAGT |
| 176 | EXON51 | SLUCAS9 | + | CAAGGAAGATGGCATTTCTAGT |
| 4154 | EXON51 | SLUCAS9 | + | ATGGCATTTCTAGTTTGGAG |
| 4155 | EXON51 | SLUCAS9 | + | GATGGCATTTCTAGTTTGGAG |
| 177 | EXON51 | SLUCAS9 | + | AGATGGCATTTCTAGTTTGGAG |
| 4156 | EXON51 | SLUCAS9 | + | GGCAGTTTCCTTAGTAACCA |
| 4157 | EXON51 | SLUCAS9 | + | TGGCAGTTTCCTTAGTAACCA |
| 178 | EXON51 | SLUCAS9 | + | ATGGCAGTTTCCTTAGTAACCA |
| 4158 | EXON51 | SLUCAS9 | + | CACCAGAGTAACAGTCTGAG |
| 4159 | EXON51 | SLUCAS9 | + | TCACCAGAGTAACAGTCTGAG |
| 179 | EXON51 | SLUCAS9 | + | GTCACCAGAGTAACAGTCTGAG |
| 4160 | EXON51 | SLUCAS9 | + | TGAGTAGGAGCTAAAATATT |
| 4161 | EXON51 | SLUCAS9 | + | CTGAGTAGGAGCTAAAATATT |
| 180 | EXON51 | SLUCAS9 | + | TCTGAGTAGGAGCTAAAATATT |
| 4162 | EXON51 | SLUCAS9 | + | GAGTAGGAGCTAAAATATTT |
| 4163 | EXON51 | SLUCAS9 | + | TGAGTAGGAGCTAAAATATTT |
| 181 | EXON51 | SLUCAS9 | + | CTGAGTAGGAGCTAAAATATTT |
| 4164 | EXON51 | SLUCAS9 | + | ATATTTTGGGTTTTTGCAAA |
| 4165 | EXON51 | SLUCAS9 | + | AATATTTTGGGTTTTTGCAAA |
| 182 | EXON51 | SLUCAS9 | + | AAATATTTTGGGTTTTTGCAAA |
| 4166 | EXON51 | SLUCAS9 | − | GTATGAGAAAAAATGATAAA |
| 4167 | EXON51 | SLUCAS9 | − | GTATGAGAAAAAATGATAAAA |
| 183 | EXON51 | SLUCAS9 | − | GTATGAGAAAAAATGATAAAAG |
| 4168 | EXON51 | SLUCAS9 | − | CAACGAGATGATCATCAAGC |
| 4169 | EXON51 | SLUCAS9 | − | CAACGAGATGATCATCAAGCA |
| 184 | EXON51 | SLUCAS9 | − | CAACGAGATGATCATCAAGCAG |
| 4170 | EXON51 | SLUCAS9 | − | GAGGGTGATGGTGGGTGACC |
| 4171 | EXON51 | SLUCAS9 | − | GAGGGTGATGGTGGGTGACCT |
| 185 | EXON51 | SLUCAS9 | − | GAGGGTGATGGTGGGTGACCTT |
| 4172 | EXON51 | SLUCAS9 | − | ATAAAATCACAGAGGGTGAT |
| 4173 | EXON51 | SLUCAS9 | − | ATAAAATCACAGAGGGTGATG |
| 186 | EXON51 | SLUCAS9 | − | ATAAAATCACAGAGGGTGATGG |
| 4174 | EXON51 | SLUCAS9 | − | TATAAAATCACAGAGGGTGA |
| 4175 | EXON51 | SLUCAS9 | − | TATAAAATCACAGAGGGTGAT |
| 187 | EXON51 | SLUCAS9 | − | TATAAAATCACAGAGGGTGATG |
| 4176 | EXON51 | SLUCAS9 | − | AGTTATAAAATCACAGAGGG |
| 4177 | EXON51 | SLUCAS9 | − | AGTTATAAAATCACAGAGGGT |
| 188 | EXON51 | SLUCAS9 | − | AGTTATAAAATCACAGAGGGTG |
| 4178 | EXON51 | SLUCAS9 | − | TGATCAAGTTATAAAATCAC |
| 4179 | EXON51 | SLUCAS9 | − | TGATCAAGTTATAAAATCACA |
| 189 | EXON51 | SLUCAS9 | − | TGATCAAGTTATAAAATCACAG |
| 4180 | EXON51 | SLUCAS9 | − | TTGATCAAGTTATAAAATCA |
| 4181 | EXON51 | SLUCAS9 | − | TTGATCAAGTTATAAAATCAC |
| 190 | EXON51 | SLUCAS9 | − | TTGATCAAGTTATAAAATCACA |
| 4182 | EXON51 | SLUCAS9 | − | GGGCTTGGACAGAACTTACC |
| 4183 | EXON51 | SLUCAS9 | − | GGGCTTGGACAGAACTTACCG |
| 191 | EXON51 | SLUCAS9 | − | GGGCTTGGACAGAACTTACCGA |
| 4184 | EXON51 | SLUCAS9 | − | CTCTGGCAGATTTCAACCGG |
| 4185 | EXON51 | SLUCAS9 | − | CTCTGGCAGATTTCAACCGGG |
| 192 | EXON51 | SLUCAS9 | − | CTCTGGCAGATTTCAACCGGGC |
| 4186 | EXON51 | SLUCAS9 | − | ACCTGCTCTGGCAGATTTCA |
| 4187 | EXON51 | SLUCAS9 | − | ACCTGCTCTGGCAGATTTCAA |
| 193 | EXON51 | SLUCAS9 | − | ACCTGCTCTGGCAGATTTCAAC |
| 4188 | EXON51 | SLUCAS9 | − | TACCTGCTCTGGCAGATTTC |
| 4189 | EXON51 | SLUCAS9 | − | TACCTGCTCTGGCAGATTTCA |
| 194 | EXON51 | SLUCAS9 | − | TACCTGCTCTGGCAGATTTCAA |
| 4190 | EXON51 | SLUCAS9 | − | CTTGATGTTGGAGGTACCTG |
| 4191 | EXON51 | SLUCAS9 | − | CTTGATGTTGGAGGTACCTGC |
| 195 | EXON51 | SLUCAS9 | − | CTTGATGTTGGAGGTACCTGCT |
| 4192 | EXON51 | SLUCAS9 | − | AATGCCATCTTCCTTGATGT |
| 4193 | EXON51 | SLUCAS9 | − | AATGCCATCTTCCTTGATGTT |
| 196 | EXON51 | SLUCAS9 | − | AATGCCATCTTCCTTGATGTTG |
| 4194 | EXON51 | SLUCAS9 | − | AGAAATGCCATCTTCCTTGA |
| 4195 | EXON51 | SLUCAS9 | − | AGAAATGCCATCTTCCTTGAT |
| 197 | EXON51 | SLUCAS9 | − | AGAAATGCCATCTTCCTTGATG |
| 4196 | EXON51 | SLUCAS9 | − | GGTGACACAACCTGTGGTTA |
| 4197 | EXON51 | SLUCAS9 | − | GGTGACACAACCTGTGGTTAC |
| 198 | EXON51 | SLUCAS9 | − | GGTGACACAACCTGTGGTTACT |
| 4198 | EXON51 | SLUCAS9 | − | TGTTACTCTGGTGACACAAC |
| 4199 | EXON51 | SLUCAS9 | − | TGTTACTCTGGTGACACAACC |
| 199 | EXON51 | SLUCAS9 | − | TGTTACTCTGGTGACACAACCT |
| 4200 | EXON51 | SLUCAS9 | − | AGCTCCTACTCAGACTGTTA |
| 4201 | EXON51 | SLUCAS9 | − | AGCTCCTACTCAGACTGTTAC |
| 200 | EXON51 | SLUCAS9 | − | AGCTCCTACTCAGACTGTTACT |
| 4202 | EXON53 | SLUCAS9 | + | AGGTATCTTTGATACTAACC |
| 4203 | EXON53 | SLUCAS9 | + | AAGGTATCTTTGATACTAACC |
| 201 | EXON53 | SLUCAS9 | + | AAAGGTATCTTTGATACTAACC |
| 4204 | EXON53 | SLUCAS9 | + | TTGGTTTCTGTGATTTTCTT |
| 4205 | EXON53 | SLUCAS9 | + | CTTGGTTTCTGTGATTTTCTT |
| 202 | EXON53 | SLUCAS9 | + | CCTTGGTTTCTGTGATTTTCTT |
| 4206 | EXON53 | SLUCAS9 | + | TTTGGATTGCATCTACTGTA |
| 4207 | EXON53 | SLUCAS9 | + | TTTTGGATTGCATCTACTGTA |
| 203 | EXON53 | SLUCAS9 | + | CTTTTGGATTGCATCTACTGTA |
| 4208 | EXON53 | SLUCAS9 | + | TTGGATTGCATCTACTGTAT |
| 4209 | EXON53 | SLUCAS9 | + | TTTGGATTGCATCTACTGTAT |
| 204 | EXON53 | SLUCAS9 | + | TTTTGGATTGCATCTACTGTAT |
| 4210 | EXON53 | SLUCAS9 | + | CCTCCTTCCATGACTCAAGC |
| 4211 | EXON53 | SLUCAS9 | + | CCCTCCTTCCATGACTCAAGC |
| 205 | EXON53 | SLUCAS9 | + | ACCCTCCTTCCATGACTCAAGC |
| 4212 | EXON53 | SLUCAS9 | + | TCCATGACTCAAGCTTGGCT |
| 4213 | EXON53 | SLUCAS9 | + | TTCCATGACTCAAGCTTGGCT |
| 206 | EXON53 | SLUCAS9 | + | CTTCCATGACTCAAGCTTGGCT |
| 4214 | EXON53 | SLUCAS9 | + | ATTTCATTCAACTGTTGCCT |
| 4215 | EXON53 | SLUCAS9 | + | CATTTCATTCAACTGTTGCCT |
| 207 | EXON53 | SLUCAS9 | + | ACATTTCATTCAACTGTTGCCT |
| 4216 | EXON53 | SLUCAS9 | + | AACTGTTGCCTCCGGTTCTG |
| 4217 | EXON53 | SLUCAS9 | + | CAACTGTTGCCTCCGGTTCTG |
| 208 | EXON53 | SLUCAS9 | + | TCAACTGTTGCCTCCGGTTCTG |
| 4218 | EXON53 | SLUCAS9 | + | AATTCTTTCAACTAGAATAA |
| 4219 | EXON53 | SLUCAS9 | + | GAATTCTTTCAACTAGAATAA |
| 209 | EXON53 | SLUCAS9 | + | TGAATTCTTTCAACTAGAATAA |
| 4220 | EXON53 | SLUCAS9 | − | CCAAAAGAAAATCACAGAAA |
| 4221 | EXON53 | SLUCAS9 | − | CCAAAAGAAAATCACAGAAAC |
| 210 | EXON53 | SLUCAS9 | − | CCAAAAGAAAATCACAGAAACC |
| 4222 | EXON53 | SLUCAS9 | − | GCCAAGCTTGAGTCATGGAA |
| 4223 | EXON53 | SLUCAS9 | − | GCCAAGCTTGAGTCATGGAAG |
| 211 | EXON53 | SLUCAS9 | − | GCCAAGCTTGAGTCATGGAAGG |
| 4224 | EXON53 | SLUCAS9 | − | AGCCAAGCTTGAGTCATGGA |
| 4225 | EXON53 | SLUCAS9 | − | AGCCAAGCTTGAGTCATGGAA |
| 212 | EXON53 | SLUCAS9 | − | AGCCAAGCTTGAGTCATGGAAG |
| 4226 | EXON53 | SLUCAS9 | − | CAGAGCCAAGCTTGAGTCAT |
| 4227 | EXON53 | SLUCAS9 | − | CAGAGCCAAGCTTGAGTCATG |
| 213 | EXON53 | SLUCAS9 | − | CAGAGCCAAGCTTGAGTCATGG |
| 4228 | EXON53 | SLUCAS9 | − | AGGCCAGAGCCAAGCTTGAG |
| 4229 | EXON53 | SLUCAS9 | − | AGGCCAGAGCCAAGCTTGAGT |
| 214 | EXON53 | SLUCAS9 | − | AGGCCAGAGCCAAGCTTGAGTC |
| 4230 | EXON53 | SLUCAS9 | − | AGAAGCTGAGCAGGTCTTAG |
| 4231 | EXON53 | SLUCAS9 | − | AGAAGCTGAGCAGGTCTTAGG |
| 215 | EXON53 | SLUCAS9 | − | AGAAGCTGAGCAGGTCTTAGGA |
| 4232 | EXON53 | SLUCAS9 | − | AAGGAAGAAGCTGAGCAGGT |
| 4233 | EXON53 | SLUCAS9 | − | AAGGAAGAAGCTGAGCAGGTC |
| 216 | EXON53 | SLUCAS9 | − | AAGGAAGAAGCTGAGCAGGTCT |
| 4234 | EXON53 | SLUCAS9 | | GGAAGCTAAGGAAGAAGCTG |
| 4235 | EXON53 | SLUCAS9 | − | GGAAGCTAAGGAAGAAGCTGA |
| 217 | EXON53 | SLUCAS9 | − | GGAAGCTAAGGAAGAAGCTGAG |
| 4236 | EXON53 | SLUCAS9 | − | TTCAACACAATGGCTGGAAG |
| 4237 | EXON53 | SLUCAS9 | − | TTCAACACAATGGCTGGAAGC |
| 218 | EXON53 | SLUCAS9 | − | TTCAACACAATGGCTGGAAGCT |
| 4238 | EXON53 | SLUCAS9 | − | GTTAAAGGATTCAACACAAT |
| 4239 | EXON53 | SLUCAS9 | − | GTTAAAGGATTCAACACAATG |
| 219 | EXON53 | SLUCAS9 | − | GTTAAAGGATTCAACACAATGG |
| 4240 | EXON53 | SLUCAS9 | − | AAATGTTAAAGGATTCAACA |
| 4241 | EXON53 | SLUCAS9 | − | AAATGTTAAAGGATTCAACAC |
| 220 | EXON53 | SLUCAS9 | − | AAATGTTAAAGGATTCAACACA |
| 4242 | EXON53 | SLUCAS9 | − | GCAACAGTTGAATGAAATGT |
| 4243 | EXON53 | SLUCAS9 | − | GCAACAGTTGAATGAAATGTT |
| 221 | EXON53 | SLUCAS9 | − | GCAACAGTTGAATGAAATGTTA |
| 4244 | EXON53 | SLUCAS9 | − | TACAAGAACACCTTCAGAAC |
| 4245 | EXON53 | SLUCAS9 | − | TACAAGAACACCTTCAGAACC |
| 222 | EXON53 | SLUCAS9 | − | TACAAGAACACCTTCAGAACCG |
| 4246 | EXON53 | SLUCAS9 | − | AAGTACAAGAACACCTTCAG |
| 4247 | EXON53 | SLUCAS9 | − | AAGTACAAGAACACCTTCAGA |
| 223 | EXON53 | SLUCAS9 | − | AAGTACAAGAACACCTTCAGAA |
| 4248 | EXON53 | SLUCAS9 | − | AGTTGAAAGAATTCAGAATC |
| 4249 | EXON53 | SLUCAS9 | − | AGTTGAAAGAATTCAGAATCA |
| 224 | EXON53 | SLUCAS9 | − | AGTTGAAAGAATTCAGAATCAG |
| 4250 | EXON53 | SLUCAS9 | − | TAGTTGAAAGAATTCAGAAT |
| 4251 | EXON53 | SLUCAS9 | − | TAGTTGAAAGAATTCAGAATC |
| 225 | EXON53 | SLUCAS9 | − | TAGTTGAAAGAATTCAGAATCA |

TABLE 2
Additional DMD Guide Sequences (human-hg38.p12)

| | | | | Genomic | | | | | |
|---|---|---|---|---|---|---|---|---|---|
| | | | | coordinate | | | | | |
| | | | | chrX_stop | | | | | |
| | | | Genomic | (includes | | SEQ ID | | | |
| | | | coordinate | PAM | | NO Guide | | | Offtargets_ |
| EXON | CAS9 | ID | chrX_start | coordinates) | Strand | sequence | Guide sequence | PAM | grouped |
| 45 | SACAS9KKH | E45SaCas9KKH1 | 31968359 | 31968387 | + | 1000 | TGTTTGCAGACCTC | GCAGAT | 20 |
| | | | | | | | CTGCCACC | | |
| 45 | SACAS9KKH | E45SaCas9KKH2 | 31968373 | 31968401 | + | 1001 | CTGCCACCGCAGAT | CCCAAT | 9 |
| | | | | | | | TCAGGCTT | | |
| 45 | SACAS9KKH | E45SaCas9KKH3 | 31968387 | 31968415 | + | 9 | TCAGGCTTCCCAAT | TAGAAT | 37 |
| | | | | | | | TTTTCCTG | | |
| 45 | SACAS9KKH | E45SaCas9KKH4 | 31968409 | 31968437 | + | 10 | TAGAATACTGGCAT | GAGGAT | 63 |
| | | | | | | | CTGTTTTT | | |
| 45 | SACAS9KKH | E45SaCas9KKH5 | 31968417 | 31968445 | + | 11 | TGGCATCTGTTTTT | CTGAAT | 35 |
| | | | | | | | GAGGATTG | | |
| 45 | SACAS9KKH | E45SaCas9KKH6 | 31968432 | 31968460 | + | 1002 | AGGATTGCTGAATT | CCCAGT | 42 |
| | | | | | | | ATTTCTTC | | |
| 45 | SACAS9KKH | E45SaCas9KKH7 | 31968442 | 31968470 | + | 1003 | AATTATTTCTTCCC | TTCAAT | 68 |
| | | | | | | | CAGTTGCA | | |
| 45 | SACAS9KKH | E45SaCas9KKH8 | 31968456 | 31968484 | + | 1004 | CAGTTGCATTCAAT | AACAGT | 17 |
| | | | | | | | GTTCTGAC | | |
| 45 | SACAS9KKH | E45SaCas9KKH9 | 31968471 | 31968499 | + | 1005 | TTCTGACAACAGTT | CCCAAT | 6 |
| | | | | | | | TGCCGCTG | | |
| 45 | SACAS9KKH | E45SaCas9KKH10 | 31968484 | 31968512 | + | 12 | TTGCCGCTGCCCAA | TGGAGT | 5 |
| | | | | | | | TGCCATCC | | |
| 45 | SACAS9KKH | E45SaCas9KKH11 | 31968495 | 31968523 | + | 1006 | CAATGCCATCCTGG | TAAGAT | 27 |
| | | | | | | | AGTTCCTG | | |
| 45 | SACAS9KKH | E45SaCas9KKH12 | 31968517 | 31968545 | + | 1007 | TAAGATACCAAAAA | AAAAAT | 96 |
| | | | | | | | GGCAAAAC | | |
| 45 | SACAS9KKH | E45SaCas9KKH13 | 31968313 | 31968341 | − | 13 | GAGGTAGGGCGACA | AGGAAT | 10 |
| | | | | | | | GATCTAAT | | |
| 45 | SACAS9KKH | E45SaCas9KKH14 | 31968319 | 31968347 | − | 1008 | AAAAAAGAGGTAGG | TCTAAT | 75 |
| | | | | | | | GCGACAGA | | |
| 45 | SACAS9KKH | E45SaCas9KKH15 | 31968324 | 31968352 | − | 1009 | GACAGAAAAAAGAG | ACAGAT | 51 |
| | | | | | | | GTAGGGCG | | |
| 45 | SACAS9KKH | E45SaCas9KKH16 | 31968336 | 31968364 | − | 1010 | AAACAGCTGTCAGA | AGAGGT | 123 |
| | | | | | | | CAGAAAAA | | |
| 45 | SACAS9KKH | E45SaCas9KKH17 | 31968368 | 31968396 | − | 1011 | GAAGCCTGAATCTG | GGAGGT | 19 |
| | | | | | | | CGGTGGCA | | |
| 45 | SACAS9KKH | E45SaCas9KKH18 | 31968378 | 31968406 | − | 1012 | GAAAAATTGGGAAG | TGCGGT | 29 |
| | | | | | | | CCTGAATC | | |
| 45 | SACAS9KKH | E45SaCas9KKH19 | 31968385 | 31968413 | − | 14 | TCTACAGGAAAAAT | CTGAAT | 64 |
| | | | | | | | TGGGAAGC | | |
| 45 | SACAS9KKH | E45SaCas9KKH20 | 31968399 | 31968427 | − | 1013 | ACAGATGCCAGTAT | AAAAAT | 22 |
| | | | | | | | TCTACAGG | | |
| 45 | SACAS9KKH | E45SaCas9KKH21 | 31968415 | 31968443 | − | 1014 | TCAGCAATCCTCAA | GCCAGT | 50 |
| | | | | | | | AAACAGAT | | |
| 45 | SACAS9KKH | E45SaCas9KKH22 | 31968421 | 31968449 | − | 1015 | AATAATTCAGCAAT | ACAGAT | 99 |
| | | | | | | | CCTCAAAA | | |
| 45 | SACAS9KKH | E45SaCas9KKH23 | 31968435 | 31968463 | − | 1016 | GCAACTGGGGAAGA | AGCAAT | 43 |
| | | | | | | | AATAATTC | | |
| 45 | SACAS9KKH | E45SaCas9KKH24 | 31968443 | 31968471 | − | 1017 | CATTGAATGCAACT | AATAAT | 54 |
| | | | | | | | GGGGAAGA | | |
| 45 | SACAS9KKH | E45SaCas9KKH25 | 31968446 | 31968474 | − | 1018 | GAACATTGAATGCA | AGAAAT | 23 |
| | | | | | | | ACTGGGGA | | |
| 45 | SACAS9KKH | E45SaCas9KKH26 | 31968463 | 31968491 | − | 15 | GCGGCAAACTGTTG | TTGAAT | 5 |
| | | | | | | | TCAGAACA | | |
| 45 | SACAS9KKH | E45SaCas9KKH27 | 31968502 | 31968530 | − | 16 | TTTTGGTATCTTAC | CAGGAT | 52 |
| | | | | | | | AGGAACTC | | |
| 45 | SLUCAS9KH | E45SLCas9KH1 | 31968332 | 31968358 | + | 2000 | CCCTACCTCTTTTT | ACAG | 23 |
| | | | | | | | TCTGTCTG | | |
| 45 | SLUCAS9KH | E45SLCas9KH2 | 31968342 | 31968368 | + | 2001 | TTTTTCTGTCTGAC | GCAG | 22 |
| | | | | | | | AGCTGTTT | | |
| 45 | SLUCAS9KH | E45SLCas9KH3 | 31968359 | 31968385 | + | 2002 | TGTTTGCAGACCTC | GCAG | 9 |
| | | | | | | | CTGCCACC | | |
| 45 | SLUCAS9KH | E45SLCas9KH4 | 31968365 | 31968391 | + | 2003 | CAGACCTCCTGCCA | TCAG | 9 |
| | | | | | | | CCGCAGAT | | |
| 45 | SLUCAS9KH | E45SLCas9KH5 | 31968366 | 31968392 | + | 128 | AGACCTCCTGCCAC | CAGG | 10 |
| | | | | | | | CGCAGATT | | |
| 45 | SLUCAS9KH | E45SLCas9KH6 | 31968386 | 31968412 | + | 2004 | TTCAGGCTTCCCAA | GTAG | 11 |
| | | | | | | | TTTTTCCT | | |
| 45 | SLUCAS9KH | E45SLCas9KH7 | 31968394 | 31968420 | + | 129 | TCCCAATTTTTCCT | CTGG | 19 |
| | | | | | | | GTAGAATA | | |
| 45 | SLUCAS9KH | E45SLCas9KH8 | 31968408 | 31968434 | + | 2005 | GTAGAATACTGGCA | TGAG | 16 |
| | | | | | | | TCTGTTTT | | |
| 45 | SLUCAS9KH | E45SLCas9KH9 | 31968409 | 31968435 | + | 130 | TAGAATACTGGCAT | GAGG | 19 |
| | | | | | | | CTGTTTTT | | |
| 45 | SLUCAS9KH | E45SLCas9KH10 | 31968433 | 31968459 | + | 2006 | GGATTGCTGAATTA | CCAG | 18 |
| | | | | | | | TTTCTTCC | | |
| 45 | SLUCAS9KH | E45SLCas9KH11 | 31968457 | 31968483 | + | 2007 | AGTTGCATTCAATG | ACAG | 10 |
| | | | | | | | TTCTGACA | | |
| 45 | SLUCAS9KH | E45SLCas9KH12 | 31968483 | 31968509 | + | 131 | TTTGCCGCTGCCCA | CTGG | 2 |
| | | | | | | | ATGCCATC | | |
| 45 | SLUCAS9KH | E45SLCas9KH13 | 31968485 | 31968511 | + | 2008 | TGCCGCTGCCCAAT | GGAG | 7 |
| | | | | | | | GCCATCCT | | |
| 45 | SLUCAS9KH | E45SLCas9KH14 | 31968495 | 31968521 | + | 2009 | CAATGCCATCCTGG | TAAG | 14 |
| | | | | | | | AGTTCCTG | | |
| 45 | SLUCAS9KH | E45SLCas9KH15 | 31968506 | 31968532 | + | 2010 | TGGAGTTCCTGTAA | AAAG | 10 |
| | | | | | | | GATACCAA | | |
| 45 | SLUCAS9KH | E45SLCas9KH16 | 31968507 | 31968533 | + | 132 | GGAGTTCCTGTAAG | AAGG | 9 |
| | | | | | | | ATACCAAA | | |
| 45 | SLUCAS9KH | E45SLCas9KH17 | 31968316 | 31968342 | − | 133 | AGAGGTAGGGCGAC | TAGG | 6 |
| | | | | | | | AGATCTAA | | |
| 45 | SLUCAS9KH | E45SLCas9KH18 | 31968317 | 31968343 | − | 2011 | AAGAGGTAGGGCGA | ATAG | 5 |
| | | | | | | | CAGATCTA | | |
| 45 | SLUCAS9KH | E45SLCas9KH19 | 31968326 | 31968352 | − | 2012 | GACAGAAAAAAGAG | ACAG | 31 |
| | | | | | | | GTAGGGCG | | |
| 45 | SLUCAS9KH | E45SLCas9KH20 | 31968332 | 31968358 | − | 134 | CTGTCAGACAGAAA | AGGG | 28 |
| | | | | | | | AAAGAGGT | | |
| 45 | SLUCAS9KH | E45SLCas9KH21 | 31968333 | 31968359 | − | 135 | GCTGTCAGACAGAA | TAGG | 43 |
| | | | | | | | AAAAGAGG | | |
| 45 | SLUCAS9KH | E45SLCas9KH22 | 31968334 | 31968360 | − | 2013 | AGCTGTCAGACAGA | GTAG | 67 |
| | | | | | | | AAAAAGAG | | |
| 45 | SLUCAS9KH | E45SLCas9KH23 | 31968337 | 31968363 | − | 136 | AACAGCTGTCAGAC | GAGG | 55 |
| | | | | | | | AGAAAAAA | | |
| 45 | SLUCAS9KH | E45SLCas9KH24 | 31968338 | 31968364 | − | 2014 | AAACAGCTGTCAGA | AGAG | 37 |
| | | | | | | | CAGAAAAA | | |
| 45 | SLUCAS9KH | E45SLCas9KH25 | 31968340 | 31968366 | − | 2015 | GCAAACAGCTGTCA | AAAG | 27 |
| | | | | | | | GACAGAAA | | |
| 45 | SLUCAS9KH | E45SLCas9KH26 | 31968347 | 31968373 | − | 2016 | GAGGTCTGCAAACA | ACAG | 23 |
| | | | | | | | GCTGTCAG | | |
| 45 | SLUCAS9KH | E45SLCas9KH27 | 31968351 | 31968377 | − | 2017 | GCAGGAGGTCTGCA | TCAG | 16 |
| | | | | | | | AACAGCTG | | |
| 45 | SLUCAS9KH | E45SLCas9KH28 | 31968358 | 31968384 | − | 2018 | TGCGGTGGCAGGAG | ACAG | 14 |
| | | | | | | | GTCTGCAA | | |
| 45 | SLUCAS9KH | E45SLCas9KH29 | 31968369 | 31968395 | − | 137 | AAGCCTGAATCTGC | GAGG | 11 |
| | | | | | | | GGTGGCAG | | |
| 45 | SLUCAS9KH | E45SLCas9KH30 | 31968370 | 31968396 | − | 2019 | GAAGCCTGAATCTG | GGAG | 15 |
| | | | | | | | CGGTGGCA | | |
| 45 | SLUCAS9KH | E45SLCas9KH31 | 31968372 | 31968398 | − | 138 | GGGAAGCCTGAATC | CAGG | 8 |
| | | | | | | | TGCGGTGG | | |
| 45 | SLUCAS9KH | E45SLCas9KH32 | 31968373 | 31968399 | − | 2020 | TGGGAAGCCTGAAT | GCAG | 6 |
| | | | | | | | CTGCGGTG | | |
| 45 | SLUCAS9KH | E45SLCas9KH33 | 31968376 | 31968402 | − | 139 | AATTGGGAAGCCTG | GTGG | 7 |
| | | | | | | | AATCTGCG | | |
| 45 | SLUCAS9KH | E45SLCas9KH34 | 31968379 | 31968405 | − | 140 | AAAAATTGGGAAGC | GCGG | 26 |
| | | | | | | | CTGAATCT | | |
| 45 | SLUCAS9KH | E45SLCas9KH35 | 31968392 | 31968418 | − | 2021 | AGTATTCTACAGGA | GAAG | 28 |
| | | | | | | | AAAATTGG | | |
| 45 | SLUCAS9KH | E45SLCas9KH36 | 31968395 | 31968421 | − | 141 | GCCAGTATTCTACA | TGGG | 16 |
| | | | | | | | GGAAAAAT | | |
| 45 | SLUCAS9KH | E45SLCas9KH37 | 31968396 | 31968422 | − | 142 | TGCCAGTATTCTAC | TTGG | 17 |
| | | | | | | | AGGAAAAA | | |
| 45 | SLUCAS9KH | E45SLCas9KH38 | 31968405 | 31968431 | − | 143 | AAAAACAGATGCCA | CAGG | 21 |
| | | | | | | | GTATTCTA | | |
| 45 | SLUCAS9KH | E45SLCas9KH39 | 31968406 | 31968432 | − | 2022 | CAAAAACAGATGCC | ACAG | 28 |
| | | | | | | | AGTATTCT | | |
| 45 | SLUCAS9KH | E45SLCas9KH40 | 31968416 | 31968442 | − | 2023 | CAGCAATCCTCAAA | CCAG | 23 |
| | | | | | | | AACAGATG | | |
| 45 | SLUCAS9KH | E45SLCas9KH41 | 31968423 | 31968449 | − | 2024 | AATAATTCAGCAAT | ACAG | 31 |
| | | | | | | | CCTCAAAA | | |
| 45 | SLUCAS9KH | E45SLCas9KH42 | 31968439 | 31968465 | − | 2025 | ATGCAACTGGGGAA | TCAG | 33 |
| | | | | | | | GAAATAAT | | |
| 45 | SLUCAS9KH | E45SLCas9KH43 | 31968450 | 31968476 | − | 2026 | CAGAACATTGAATG | GAAG | 11 |
| | | | | | | | CAACTGGG | | |
| 45 | SLUCAS9KH | E45SLCas9KH44 | 31968453 | 31968479 | − | 144 | TGTCAGAACATTGA | GGGG | 12 |
| | | | | | | | ATGCAACT | | |
| 45 | SLUCAS9KH | E45SLCas9KH45 | 31968454 | 31968480 | − | 145 | TTGTCAGAACATTG | TGGG | 30 |
| | | | | | | | AATGCAAC | | |
| 45 | SLUCAS9KH | E45SLCas9KH46 | 31968455 | 31968481 | − | 146 | GTTGTCAGAACATT | CTGG | 12 |
| | | | | | | | GAATGCAA | | |
| 45 | SLUCAS9KH | E45SLCas9KH47 | 31968473 | 31968499 | − | 2027 | ATTGGGCAGCGGCA | TCAG | 3 |
| | | | | | | | AACTGTTG | | |
| 45 | SLUCAS9KH | E45SLCas9KH48 | 31968487 | 31968513 | − | 147 | AACTCCAGGATGGC | GCGG | 9 |
| | | | | | | | ATTGGGCA | | |
| 45 | SLUCAS9KH | E45SLCas9KH49 | 31968490 | 31968516 | − | 2028 | AGGAACTCCAGGAT | GCAG | 16 |
| | | | | | | | GGCATTGG | | |
| 45 | SLUCAS9KH | E45SLCas9KH50 | 31968493 | 31968519 | − | 148 | TACAGGAACTCCAG | TGGG | 10 |
| | | | | | | | GATGGCAT | | |
| 45 | SLUCAS9KH | E45SLCas9KH51 | 31968494 | 31968520 | − | 149 | TTACAGGAACTCCA | TTGG | 13 |
| | | | | | | | GGATGGCA | | |
| 45 | SLUCAS9KH | E45SLCas9KH52 | 31968500 | 31968526 | − | 150 | GGTATCTTACAGGA | ATGG | 7 |
| | | | | | | | ACTCCAGG | | |
| 45 | SLUCAS9KH | E45SLCas9KH53 | 31968504 | 31968530 | − | 151 | TTTTGGTATCTTAC | CAGG | 35 |
| | | | | | | | AGGAACTC | | |
| 45 | SLUCAS9KH | E45SLCas9KH54 | 31968505 | 31968531 | − | 2029 | TTTTTGGTATCTTA | CCAG | 21 |
| | | | | | | | CAGGAACT | | |
| 45 | SLUCAS9KH | E45SLCas9KH55 | 31968513 | 31968539 | − | 152 | GTTTTGCCTTTTTG | CAGG | 32 |
| | | | | | | | GTATCTTA | | |
| 45 | SLUCAS9KH | E45SLCas9KH56 | 31968514 | 31968540 | − | 2030 | TGTTTTGCCTTTTT | ACAG | 58 |
| | | | | | | | GGTATCTT | | |
| 51 | SACAS9KKH | E51SaCas9KKH1 | 31773943 | 31773971 | + | 1019 | TCATTTTTTCTCAT | CTTGAT | 91 |
| | | | | | | | ACCTTCTG | | |
| 51 | SACAS9KKH | E51SaCas9KKH2 | 31773946 | 31773974 | + | 1020 | TTTTTTCTCATACC | GATGAT | 132 |
| | | | | | | | TTCTGCTT | | |
| 51 | SACAS9KKH | E51SaCas9KKH3 | 31773958 | 31773986 | + | 1021 | CCTTCTGCTTGATG | GTTGAT | 23 |
| | | | | | | | ATCATCTC | | |
| 51 | SACAS9KKH | E51SaCas9KKH4 | 31773969 | 31773997 | + | 1022 | ATGATCATCTCGTT | CAAGGT | 15 |
| | | | | | | | GATATCCT | | |
| 51 | SACAS9KKH | E51SaCas9KKH5 | 31773992 | 31774020 | + | 1023 | AAGGTCACCCACCA | TGTGAT | 33 |
| | | | | | | | TCACCCTC | | |
| 51 | SACAS9KKH | E51SaCas9KKH6 | 31774005 | 31774033 | + | 1024 | ATCACCCTCTGTGA | CTTGAT | 45 |
| | | | | | | | TTTTATAA | | |
| 51 | SACAS9KKH | E51SaCas9KKH7 | 31774023 | 31774051 | + | 1025 | ATAACTTGATCAAG | GCCAGT | 101 |
| | | | | | | | CAGAGAAA | | |
| 51 | SACAS9KKH | E51SaCas9KKH8 | 31774027 | 31774055 | + | 1026 | CTTGATCAAGCAGA | GTCGGT | 55 |
| | | | | | | | GAAAGCCA | | |
| 51 | SACAS9KKH | E51SaCas9KKH9 | 31774031 | 31774059 | + | 1027 | ATCAAGCAGAGAAA | GTAAGT | 16 |
| | | | | | | | GCCAGTCG | | |
| 51 | SACAS9KKH | E51SaCas9KKH10 | 31774047 | 31774075 | + | 1028 | CAGTCGGTAAGTTC | CCCGGT | 7 |
| | | | | | | | TGTCCAAG | | |
| 51 | SACAS9KKH | E51SaCas9KKH11 | 31774053 | 31774081 | + | 1029 | GTAAGTTCTGTCCA | TGAAAT | 4 |
| | | | | | | | AGCCCGGT | | |
| 51 | SACAS9KKH | E51SaCas9KKH12 | 31774067 | 31774095 | + | 1030 | AGCCCGGTTGAAAT | GCAGGT | 7 |
| | | | | | | | CTGCCAGA | | |
| 51 | SACAS9KKH | E51SaCas9KKH13 | 31774088 | 31774116 | + | 1031 | AGCAGGTACCTCCA | GAAGAT | 23 |
| | | | | | | | ACATCAAG | | |
| 51 | SACAS9KKH | E51SaCas9KKH14 | 31774100 | 31774128 | + | 1032 | CAACATCAAGGAAG | TCTAGT | 54 |
| | | | | | | | ATGGCATT | | |
| 51 | SACAS9KKH | E51SaCas9KKH15 | 31774108 | 31774136 | + | 1033 | AGGAAGATGGCATT | GGAGAT | 62 |
| | | | | | | | TCTAGTTT | | |
| 51 | SACAS9KKH | E51SaCas9KKH16 | 31774114 | 31774142 | + | 1034 | ATGGCATTTCTAGT | GGCAGT | 56 |
| | | | | | | | TTGGAGAT | | |
| 51 | SACAS9KKH | E51SaCas9KKH17 | 31774123 | 31774151 | + | 1035 | CTAGTTTGGAGATG | CTTAGT | 32 |
| | | | | | | | GCAGTTTC | | |
| 51 | SACAS9KKH | E51SaCas9KKH18 | 31774133 | 31774161 | + | 1036 | GATGGCAGTTTCCT | ACAGGT | 24 |
| | | | | | | | TAGTAACC | | |
| 51 | SACAS9KKH | E51SaCas9KKH19 | 31774147 | 31774175 | + | 19 | TAGTAACCACAGGT | CAGAGT | 18 |
| | | | | | | | TGTGTCAC | | |
| 51 | SACAS9KKH | E51SaCas9KKH20 | 31774153 | 31774181 | + | 1037 | CCACAGGTTGTGTC | AACAGT | 20 |
| | | | | | | | ACCAGAGT | | |
| 51 | SACAS9KKH | E51SaCas9KKH21 | 31774159 | 31774187 | + | 20 | GTTGTGTCACCAGA | CTGAGT | 21 |
| | | | | | | | GTAACAGT | | |
| 51 | SACAS9KKH | E51SaCas9KKH22 | 31774171 | 31774199 | + | 1038 | GAGTAACAGTCTGA | TAAAAT | 18 |
| | | | | | | | GTAGGAGC | | |
| 51 | SACAS9KKH | E51SaCas9KKH23 | 31774180 | 31774208 | + | 21 | TCTGAGTAGGAGCT | TTGGGT | 38 |
| | | | | | | | AAAATATT | | |
| 51 | SACAS9KKH | E51SaCas9KKH24 | 31773936 | 31773964 | − | 1039 | AGAAGGTATGAGAA | AAAAGT | 236 |
| | | | | | | | AAAATGAT | | |
| 51 | SACAS9KKH | E51SaCas9KKH25 | 31773942 | 31773970 | − | 1040 | TCAAGCAGAAGGTA | AATGAT | 99 |
| | | | | | | | TGAGAAAA | | |
| 51 | SACAS9KKH | E51SaCas9KKH26 | 31773945 | 31773973 | − | 1041 | TCATCAAGCAGAAG | AAAAAT | 43 |
| | | | | | | | GTATGAGA | | |
| 51 | SACAS9KKH | E51SaCas9KKH27 | 31773957 | 31773985 | − | 1042 | TCAACGAGATGATC | GAAGGT | 10 |
| | | | | | | | ATCAAGCA | | |
| 51 | SACAS9KKH | E51SaCas9KKH28 | 31773972 | 31774000 | − | 1043 | GTGACCTTGAGGAT | GATGAT | 7 |
| | | | | | | | ATCAACGA | | |
| 51 | SACAS9KKH | E51SaCas9KKH29 | 31773975 | 31774003 | − | 1044 | TGGGTGACCTTGAG | CGAGAT | 68 |
| | | | | | | | GATATCAA | | |
| 51 | SACAS9KKH | E51SaCas9KKH30 | 31773986 | 31774014 | − | 22 | GAGGGTGATGGTGG | GAGGAT | 46 |
| | | | | | | | GTGACCTT | | |
| 51 | SACAS9KKH | E51SaCas9KKH31 | 31773998 | 31774026 | − | 23 | TATAAAATCACAGA | GTGGGT | 42 |
| | | | | | | | GGGTGATG | | |
| 51 | SACAS9KKH | E51SaCas9KKH32 | 31774002 | 31774030 | − | 1045 | AAGTTATAAAATCA | GATGGT | 77 |
| | | | | | | | CAGAGGGT | | |
| 51 | SACAS9KKH | E51SaCas9KKH33 | 31774005 | 31774033 | − | 1046 | ATCAAGTTATAAAA | GGTGAT | 90 |
| | | | | | | | TCACAGAG | | |
| 51 | SACAS9KKH | E51SaCas9KKH34 | 31774008 | 31774036 | − | 24 | TTGATCAAGTTATA | GAGGGT | 86 |
| | | | | | | | AAATCACA | | |
| 51 | SACAS9KKH | E51SaCas9KKH35 | 31774018 | 31774046 | − | 1047 | CTTTCTCTGCTTGA | TAAAAT | 45 |
| | | | | | | | TCAAGTTA | | |
| 51 | SACAS9KKH | E51SaCas9KKH36 | 31774026 | 31774054 | − | 1048 | CCGACTGGCTTTCT | TCAAGT | 18 |
| | | | | | | | CTGCTTGA | | |
| 51 | SACAS9KKH | E51SaCas9KKH37 | 31774031 | 31774059 | − | 1049 | ACTTACCGACTGGC | CTTGAT | 11 |
| | | | | | | | TTTCTCTG | | |
| 51 | SACAS9KKH | E51SaCas9KKH38 | 31774079 | 31774107 | − | 1050 | GATGTTGGAGGTAC | GCAGAT | 22 |
| | | | | | | | CTGCTCTG | | |
| 51 | SACAS9KKH | E51SaCas9KKH39 | 31774095 | 31774123 | − | 1051 | AAATGCCATCTTCC | GGAGGT | 57 |
| | | | | | | | TTGATGTT | | |
| 51 | SACAS9KKH | E51SaCas9KKH40 | 31774104 | 31774132 | − | 1052 | CCAAACTAGAAATG | CTTGAT | 46 |
| | | | | | | | CCATCTTC | | |
| 51 | SACAS9KKH | E51SaCas9KKH41 | 31774119 | 31774147 | − | 1053 | AGGAAACTGCCATC | AGAAAT | 63 |
| | | | | | | | TCCAAACT | | |
| 51 | SACAS9KKH | E51SaCas9KKH42 | 31774152 | 31774180 | − | 1054 | CTGTTACTCTGGTG | TGTGGT | 27 |
| | | | | | | | ACACAACC | | |
| 51 | SACAS9KKH | E51SaCas9KKH43 | 31774167 | 31774195 | − | 1055 | TAGCTCCTACTCAG | TCTGGT | 13 |
| | | | | | | | ACTGTTAC | | |
| 51 | SLUCAS9KH | E51SLCas9KH1 | 31773969 | 31773995 | + | 2031 | ATGATCATCTCGTT | CAAG | 6 |
| | | | | | | | GATATCCT | | |
| 51 | SLUCAS9KH | E51SLCas9KH2 | 31773970 | 31773996 | + | 170 | TGATCATCTCGTTG | AAGG | 6 |
| | | | | | | | ATATCCTC | | |
| 51 | SLUCAS9KH | E51SLCas9KH3 | 31774011 | 31774037 | + | 2032 | CTCTGTGATTTTAT | CAAG | 18 |
| | | | | | | | AACTTGAT | | |
| 51 | SLUCAS9KH | E51SLCas9KH4 | 31774014 | 31774040 | + | 2033 | TGTGATTTTATAAC | GCAG | 29 |
| | | | | | | | TTGATCAA | | |
| 51 | SLUCAS9KH | E51SLCas9KH5 | 31774016 | 31774042 | + | 2034 | TGATTTTATAACTT | AGAG | 15 |
| | | | | | | | GATCAAGC | | |
| 51 | SLUCAS9KH | E51SLCas9KH6 | 31774020 | 31774046 | + | 2035 | TTTATAACTTGATC | AAAG | 7 |
| | | | | | | | AAGCAGAG | | |
| 51 | SLUCAS9KH | E51SLCas9KH7 | 31774024 | 31774050 | + | 2036 | TAACTTGATCAAGC | CCAG | 24 |
| | | | | | | | AGAGAAAG | | |
| 51 | SLUCAS9KH | E51SLCas9KH8 | 31774028 | 31774054 | + | 171 | TTGATCAAGCAGAG | TCGG | 23 |
| | | | | | | | AAAGCCAG | | |
| 51 | SLUCAS9KH | E51SLCas9KH9 | 31774032 | 31774058 | + | 2037 | TCAAGCAGAGAAAG | TAAG | 7 |
| | | | | | | | CCAGTCGG | | |
| 51 | SLUCAS9KH | E51SLCas9KH10 | 31774043 | 31774069 | + | 2038 | AAGCCAGTCGGTAA | CAAG | 7 |
| | | | | | | | GTTCTGTC | | |
| 51 | SLUCAS9KH | E51SLCas9KH11 | 31774048 | 31774074 | + | 172 | AGTCGGTAAGTTCT | CCGG | 2 |
| | | | | | | | GTCCAAGC | | |
| 51 | SLUCAS9KH | E51SLCas9KH12 | 31774062 | 31774088 | + | 2039 | GTCCAAGCCCGGTT | CCAG | 1 |
| | | | | | | | GAAATCTG | | |
| 51 | SLUCAS9KH | E51SLCas9KH13 | 31774064 | 31774090 | + | 2040 | CCAAGCCCGGTTGA | AGAG | 2 |
| | | | | | | | AATCTGCC | | |
| 51 | SLUCAS9KH | E51SLCas9KH14 | 31774067 | 31774093 | + | 2041 | AGCCCGGTTGAAAT | GCAG | 4 |
| | | | | | | | CTGCCAGA | | |
| 51 | SLUCAS9KH | E51SLCas9KH15 | 31774068 | 31774094 | + | 173 | GCCCGGTTGAAATC | CAGG | 5 |
| | | | | | | | TGCCAGAG | | |
| 51 | SLUCAS9KH | E51SLCas9KH16 | 31774084 | 31774110 | + | 2042 | CCAGAGCAGGTACC | CAAG | 14 |
| | | | | | | | TCCAACAT | | |
| 51 | SLUCAS9KH | E51SLCas9KH17 | 31774085 | 31774111 | + | 174 | CAGAGCAGGTACCT | AAGG | 13 |
| | | | | | | | CCAACATC | | |
| 51 | SLUCAS9KH | E51SLCas9KH18 | 31774088 | 31774114 | + | 2043 | AGCAGGTACCTCCA | GAAG | 12 |
| | | | | | | | ACATCAAG | | |
| 51 | SLUCAS9KH | E51SLCas9KH19 | 31774092 | 31774118 | + | 175 | GGTACCTCCAACAT | ATGG | 6 |
| | | | | | | | CAAGGAAG | | |
| 51 | SLUCAS9KH | E51SLCas9KH20 | 31774101 | 31774127 | + | 2044 | AACATCAAGGAAGA | CTAG | 32 |
| | | | | | | | TGGCATTT | | |
| 51 | SLUCAS9KH | E51SLCas9KH21 | 31774106 | 31774132 | + | 176 | CAAGGAAGATGGCA | TTGG | 21 |
| | | | | | | | TTTCTAGT | | |
| 51 | SLUCAS9KH | E51SLCas9KH22 | 31774108 | 31774134 | + | 2045 | AGGAAGATGGCATT | GGAG | 50 |
| | | | | | | | TCTAGTTT | | |
| 51 | SLUCAS9KH | E51SLCas9KH23 | 31774112 | 31774138 | + | 177 | AGATGGCATTTCTA | ATGG | 10 |
| | | | | | | | GTTTGGAG | | |
| 51 | SLUCAS9KH | E51SLCas9KH24 | 31774115 | 31774141 | + | 2046 | TGGCATTTCTAGTT | GCAG | 22 |
| | | | | | | | TGGAGATG | | |
| 51 | SLUCAS9KH | E51SLCas9KH25 | 31774124 | 31774150 | + | 2047 | TAGTTTGGAGATGG | TTAG | 20 |
| | | | | | | | CAGTTTCC | | |
| 51 | SLUCAS9KH | E51SLCas9KH26 | 31774133 | 31774159 | + | 2048 | GATGGCAGTTTCCT | ACAG | 11 |
| | | | | | | | TAGTAACC | | |
| 51 | SLUCAS9KH | E51SLCas9KH27 | 31774134 | 31774160 | + | 178 | ATGGCAGTTTCCTT | CAGG | 14 |
| | | | | | | | AGTAACCA | | |
| 51 | SLUCAS9KH | E51SLCas9KH28 | 31774146 | 31774172 | + | 2049 | TTAGTAACCACAGG | CCAG | 7 |
| | | | | | | | TTGTGTCA | | |
| 51 | SLUCAS9KH | E51SLCas9KH29 | 31774148 | 31774174 | + | 2050 | AGTAACCACAGGTT | AGAG | 7 |
| | | | | | | | GTGTCACC | | |
| 51 | SLUCAS9KH | E51SLCas9KH30 | 31774154 | 31774180 | + | 2051 | CACAGGTTGTGTCA | ACAG | 14 |
| | | | | | | | CCAGAGTA | | |
| 51 | SLUCAS9KH | E51SLCas9KH31 | 31774160 | 31774186 | + | 2052 | TTGTGTCACCAGAG | TGAG | 9 |
| | | | | | | | TAACAGTC | | |
| 51 | SLUCAS9KH | E51SLCas9KH32 | 31774163 | 31774189 | + | 2053 | TGTCACCAGAGTAA | GTAG | 9 |
| | | | | | | | CAGTCTGA | | |
| 51 | SLUCAS9KH | E51SLCas9KH33 | 31774164 | 31774190 | + | 179 | GTCACCAGAGTAAC | TAGG | 14 |
| | | | | | | | AGTCTGAG | | |
| 51 | SLUCAS9KH | E51SLCas9KH34 | 31774166 | 31774192 | + | 2054 | CACCAGAGTAACAG | GGAG | 11 |
| | | | | | | | TCTGAGTA | | |
| 51 | SLUCAS9KH | E51SLCas9KH35 | 31774180 | 31774206 | + | 180 | TCTGAGTAGGAGCT | TTGG | 11 |
| | | | | | | | AAAATATT | | |
| 51 | SLUCAS9KH | E51SLCas9KH36 | 31774181 | 31774207 | + | 181 | CTGAGTAGGAGCTA | TGGG | 21 |
| | | | | | | | AAATATTT | | |
| 51 | SLUCAS9KH | E51SLCas9KH37 | 31774194 | 31774220 | + | 2055 | AAAATATTTTGGGT | AAAG | 56 |
| | | | | | | | TTTTGCAA | | |
| 51 | SLUCAS9KH | E51SLCas9KH38 | 31774195 | 31774221 | + | 182 | AAATATTTTGGGTT | AAGG | 61 |
| | | | | | | | TTTGCAAA | | |
| 51 | SLUCAS9KH | E51SLCas9KH39 | 31773927 | 31773953 | − | 2056 | GAAAAAATGATAAA | GAAG | 77 |
| | | | | | | | AGTTGGCA | | |
| 51 | SLUCAS9KH | E51SLCas9KH40 | 31773930 | 31773956 | − | 2057 | TGAGAAAAAATGAT | GCAG | 124 |
| | | | | | | | AAAAGTTG | | |
| 51 | SLUCAS9KH | E51SLCas9KH41 | 31773933 | 31773959 | − | 183 | GTATGAGAAAAAAT | TTGG | 99 |
| | | | | | | | GATAAAAG | | |
| 51 | SLUCAS9KH | E51SLCas9KH42 | 31773937 | 31773963 | − | 2058 | GAAGGTATGAGAAA | AAAG | 64 |
| | | | | | | | AAATGATA | | |
| 51 | SLUCAS9KH | E51SLCas9KH43 | 31773952 | 31773978 | − | 2059 | GATGATCATCAAGC | TGAG | 11 |
| | | | | | | | AGAAGGTA | | |
| 51 | SLUCAS9KH | E51SLCas9KH44 | 31773958 | 31773984 | − | 184 | CAACGAGATGATCA | AAGG | 7 |
| | | | | | | | TCAAGCAG | | |
| 51 | SLUCAS9KH | E51SLCas9KH45 | 31773959 | 31773985 | − | 2060 | TCAACGAGATGATC | GAAG | 3 |
| | | | | | | | ATCAAGCA | | |
| 51 | SLUCAS9KH | E51SLCas9KH46 | 31773962 | 31773988 | − | 2061 | ATATCAACGAGATG | GCAG | 7 |
| | | | | | | | ATCATCAA | | |
| 51 | SLUCAS9KH | E51SLCas9KH47 | 31773965 | 31773991 | − | 2062 | AGGATATCAACGAG | CAAG | 7 |
| | | | | | | | ATGATCAT | | |
| 51 | SLUCAS9KH | E51SLCas9KH48 | 31773977 | 31774003 | − | 2063 | TGGGTGACCTTGAG | CGAG | 17 |
| | | | | | | | GATATCAA | | |
| 51 | SLUCAS9KH | E51SLCas9KH49 | 31773988 | 31774014 | − | 185 | GAGGGTGATGGTGG | GAGG | 22 |
| | | | | | | | GTGACCTT | | |
| 51 | SLUCAS9KH | E51SLCas9KH50 | 31773989 | 31774015 | − | 2064 | AGAGGGTGATGGTG | TGAG | 48 |
| | | | | | | | GGTGACCT | | |
| 51 | SLUCAS9KH | E51SLCas9KH51 | 31773999 | 31774025 | − | 186 | ATAAAATCACAGAG | TGGG | 27 |
| | | | | | | | GGTGATGG | | |
| 51 | SLUCAS9KH | E51SLCas9KH52 | 31774000 | 31774026 | − | 187 | TATAAAATCACAGA | GTGG | 23 |
| | | | | | | | GGGTGATG | | |
| 51 | SLUCAS9KH | E51SLCas9KH53 | 31774003 | 31774029 | − | 188 | AGTTATAAAATCAC | ATGG | 20 |
| | | | | | | | AGAGGGTG | | |
| 51 | SLUCAS9KH | E51SLCas9KH54 | 31774009 | 31774035 | − | 189 | TGATCAAGTTATAA | AGGG | 29 |
| | | | | | | | AATCACAG | | |
| 51 | SLUCAS9KH | E51SLCas9KH55 | 31774010 | 31774036 | − | 190 | TTGATCAAGTTATA | GAGG | 30 |
| | | | | | | | AAATCACA | | |
| 51 | SLUCAS9KH | E51SLCas9KH56 | 31774011 | 31774037 | − | 2065 | CTTGATCAAGTTAT | AGAG | 14 |
| | | | | | | | AAAATCAC | | |
| 51 | SLUCAS9KH | E51SLCas9KH57 | 31774013 | 31774039 | − | 2066 | TGCTTGATCAAGTT | ACAG | 11 |
| | | | | | | | ATAAAATC | | |
| 51 | SLUCAS9KH | E51SLCas9KH58 | 31774027 | 31774053 | − | 2067 | CGACTGGCTTTCTC | CAAG | 8 |
| | | | | | | | TGCTTGAT | | |
| 51 | SLUCAS9KH | E51SLCas9KH59 | 31774046 | 31774072 | − | 191 | GGGCTTGGACAGAA | CTGG | 2 |
| | | | | | | | CTTACCGA | | |
| 51 | SLUCAS9KH | E51SLCas9KH60 | 31774060 | 31774086 | − | 2068 | GGCAGATTTCAACC | ACAG | 5 |
| | | | | | | | GGGCTTGG | | |
| 51 | SLUCAS9KH | E51SLCas9KH61 | 31774064 | 31774090 | − | 192 | CTCTGGCAGATTTC | TTGG | 1 |
| | | | | | | | AACCGGGC | | |
| 51 | SLUCAS9KH | E51SLCas9KH62 | 31774069 | 31774095 | − | 193 | ACCTGCTCTGGCAG | CGGG | 10 |
| | | | | | | | ATTTCAAC | | |
| 51 | SLUCAS9KH | E51SLCas9KH63 | 31774070 | 31774096 | − | 194 | TACCTGCTCTGGCA | CCGG | 10 |
| | | | | | | | GATTTCAA | | |
| 51 | SLUCAS9KH | E51SLCas9KH64 | 31774081 | 31774107 | − | 2069 | GATGTTGGAGGTAC | GCAG | 7 |
| | | | | | | | CTGCTCTG | | |
| 51 | SLUCAS9KH | E51SLCas9KH65 | 31774084 | 31774110 | − | 195 | CTTGATGTTGGAGG | CTGG | 7 |
| | | | | | | | TACCTGCT | | |
| 51 | SLUCAS9KH | E51SLCas9KH66 | 31774096 | 31774122 | − | 196 | AATGCCATCTTCCT | GAGG | 22 |
| | | | | | | | TGATGTTG | | |
| 51 | SLUCAS9KH | E51SLCas9KH67 | 31774097 | 31774123 | − | 2070 | AAATGCCATCTTCC | GGAG | 19 |
| | | | | | | | TTGATGTT | | |
| 51 | SLUCAS9KH | E51SLCas9KH68 | 31774099 | 31774125 | − | 197 | AGAAATGCCATCTT | TTGG | 26 |
| | | | | | | | CCTTGATG | | |
| 51 | SLUCAS9KH | E51SLCas9KH69 | 31774123 | 31774149 | − | 2071 | TAAGGAAACTGCCA | CTAG | 41 |
| | | | | | | | TCTCCAAA | | |
| 51 | SLUCAS9KH | E51SLCas9KH70 | 31774144 | 31774170 | − | 198 | GGTGACACAACCTG | AAGG | 6 |
| | | | | | | | TGGTTACT | | |
| 51 | SLUCAS9KH | E51SLCas9KH71 | 31774145 | 31774171 | − | 2072 | TGGTGACACAACCT | TAAG | 10 |
| | | | | | | | GTGGTTAC | | |
| 51 | SLUCAS9KH | E51SLCas9KH72 | 31774153 | 31774179 | − | 199 | TGTTACTCTGGTGA | GTGG | 22 |
| | | | | | | | CACAACCT | | |
| 51 | SLUCAS9KH | E51SLCas9KH73 | 31774168 | 31774194 | − | 200 | AGCTCCTACTCAGA | CTGG | 2 |
| | | | | | | | CTGTTACT | | |
| 51 | SLUCAS9KH | E51SLCas9KH74 | 31774181 | 31774207 | − | 2073 | CCCAAAATATTTTA | TCAG | 10 |
| | | | | | | | GCTCCTAC | | |
| 51 | SLUCAS9KH | E51SLCas9KH75 | 31774192 | 31774218 | − | 2074 | TTTTGCAAAAACCC | TTAG | 43 |
| | | | | | | | AAAATATT | | |
| 53 | SACAS9KKH | E53SaCas9KKH1 | 31679352 | 31679380 | + | 1056 | AAAAGGTATCTTTG | CTTGGT | 45 |
| | | | | | | | ATACTAAC | | |
| 53 | SACAS9KKH | E53SaCas9KKH2 | 31679361 | 31679389 | + | 1057 | CTTTGATACTAACC | TGTGAT | 20 |
| | | | | | | | TTGGTTTC | | |
| 53 | SACAS9KKH | E53SaCas9KKH3 | 31679373 | 31679401 | + | 25 | CCTTGGTTTCTGTG | TTGGAT | 122 |
| | | | | | | | ATTTTCTT | | |
| 53 | SACAS9KKH | E53SaCas9KKH4 | 31679477 | 31679505 | + | 26 | TCCTTAGCTTCCAG | TTGAAT | 42 |
| | | | | | | | CCATTGTG | | |
| 53 | SACAS9KKH | E53SaCas9KKH5 | 31679510 | 31679538 | + | 1058 | AACATTTCATTCAA | TCCGGT | 46 |
| | | | | | | | CTGTTGCC | | |
| 53 | SACAS9KKH | E53SaCas9KKH6 | 31679519 | 31679547 | + | 1059 | TTCAACTGTTGCCT | GAAGGT | 9 |
| | | | | | | | CCGGTTCT | | |
| 53 | SACAS9KKH | E53SaCas9KKH7 | 31679543 | 31679571 | + | 1060 | AGGTGTTCTTGTAC | ACTGAT | 16 |
| | | | | | | | TTCATCCC | | |
| 53 | SACAS9KKH | E53SaCas9KKH8 | 31679550 | 31679578 | + | 27 | CTTGTACTTCATCC | CTGAAT | 58 |
| | | | | | | | CACTGATT | | |
| 53 | SACAS9KKH | E53SaCas9KKH9 | 31679565 | 31679593 | + | 28 | ACTGATTCTGAATT | TAGAAT | 78 |
| | | | | | | | CTTTCAAC | | |
| 53 | SACAS9KKH | E53SaCas9KKH10 | 31679577 | 31679605 | + | 1061 | TTCTTTCAACTAGA | AAAAAT | 86 |
| | | | | | | | ATAAAAGG | | |
| 53 | SACAS9KKH | E53SaCas9KKH11 | 31679581 | 31679609 | + | 1062 | TTCAACTAGAATAA | ATAAAT | 420 |
| | | | | | | | AAGGAAAA | | |
| 53 | SACAS9KKH | E53SaCas9KKH12 | 31679588 | 31679616 | + | 1063 | AGAATAAAAGGAAA | TATAGT | 5266 |
| | | | | | | | AATAAATA | | |
| 53 | SACAS9KKH | E53SaCas9KKH13 | 31679346 | 31679374 | − | 1064 | GTTAGTATCAAAGA | TAAAAT | 31 |
| | | | | | | | TACCTTTT | | |
| 53 | SACAS9KKH | E53SaCas9KKH14 | 31679359 | 31679387 | − | 1065 | CACAGAAACCAAGG | AAAGAT | 33 |
| | | | | | | | TTAGTATC | | |
| 53 | SACAS9KKH | E53SaCas9KKH15 | 31679368 | 31679396 | − | 1066 | AAAGAAAATCACAG | GTTAGT | 456 |
| | | | | | | | AAACCAAG | | |
| 53 | SACAS9KKH | E53SaCas9KKH16 | 31679372 | 31679400 | − | 1067 | TCCAAAAGAAAATC | CAAGGT | 246 |
| | | | | | | | ACAGAAAC | | |
| 53 | SACAS9KKH | E53SaCas9KKH17 | 31679387 | 31679415 | − | 1068 | ATACAGTAGATGCA | GAAAAT | 49 |
| | | | | | | | ATCCAAAA | | |
| 53 | SACAS9KKH | E53SaCas9KKH18 | 31679399 | 31679427 | − | 1069 | AGGAGGGTCCCTAT | TGCAAT | 13 |
| | | | | | | | ACAGTAGA | | |
| 53 | SACAS9KKH | E53SaCas9KKH19 | 31679404 | 31679432 | − | 1070 | ATGGAAGGAGGGTC | GTAGAT | 20 |
| | | | | | | | CCTATACA | | |
| 53 | SACAS9KKH | E53SaCas9KKH20 | 31679408 | 31679436 | − | 1071 | AGTCATGGAAGGAG | TACAGT | 27 |
| | | | | | | | GGTCCCTA | | |
| 53 | SACAS9KKH | E53SaCas9KKH21 | 31679419 | 31679447 | − | 29 | AGCCAAGCTTGAGT | GAGGGT | 36 |
| | | | | | | | CATGGAAG | | |
| 53 | SACAS9KKH | E53SaCas9KKH22 | 31679433 | 31679461 | − | 30 | TTAGGACAGGCCAG | TTGAGT | 30 |
| | | | | | | | AGCCAAGC | | |
| 53 | SACAS9KKH | E53SaCas9KKH23 | 31679462 | 31679490 | − | 1072 | TGGAAGCTAAGGAA | GCAGGT | 103 |
| | | | | | | | GAAGCTGA | | |
| 53 | SACAS9KKH | E53SaCas9KKH24 | 31679493 | 31679521 | − | 1073 | AATGAAATGTTAAA | CACAAT | 200 |
| | | | | | | | GGATTCAA | | |
| 53 | SACAS9KKH | E53SaCas9KKH25 | 31679503 | 31679531 | − | 31 | GCAACAGTTGAATG | AAGGAT | 155 |
| | | | | | | | AAATGTTA | | |
| 53 | SACAS9KKH | E53SaCas9KKH26 | 31679513 | 31679541 | − | 1074 | AGAACCGGAGGCAA | TGAAAT | 11 |
| | | | | | | | CAGTTGAA | | |
| 53 | SACAS9KKH | E53SaCas9KKH27 | 31679518 | 31679546 | − | 32 | CCTTCAGAACCGGA | TTGAAT | 8 |
| | | | | | | | GGCAACAG | | |
| 53 | SACAS9KKH | E53SaCas9KKH28 | 31679523 | 31679551 | − | 1075 | GAACACCTTCAGAA | AACAGT | 10 |
| | | | | | | | CCGGAGGC | | |
| 53 | SACAS9KKH | E53SaCas9KKH29 | 31679555 | 31679583 | − | 1076 | AAAGAATTCAGAAT | TGAAGT | 106 |
| | | | | | | | CAGTGGGA | | |
| 53 | SACAS9KKH | E53SaCas9KKH30 | 31679560 | 31679588 | − | 33 | AGTTGAAAGAATTC | TGGGAT | 110 |
| | | | | | | | AGAATCAG | | |
| 53 | SACAS9KKH | E53SaCas9KKH31 | 31679565 | 31679593 | − | 1077 | ATTCTAGTTGAAAG | ATCAGT | 134 |
| | | | | | | | AATTCAGA | | |
| 53 | SACAS9KKH | E53SaCas9KKH32 | 31679569 | 31679597 | − | 34 | TTTTATTCTAGTTG | CAGAAT | 399 |
| | | | | | | | AAAGAATT | | |
| 53 | SACAS9KKH | E53SaCas9KKH33 | 31679576 | 31679604 | − | 35 | TTTTTCCTTTTATT | AAGAAT | 475 |
| | | | | | | | CTAGTTGA | | |
| 53 | SACAS9KKH | E53SaCas9KKH34 | 31679585 | 31679613 | − | 1078 | ATATATTTATTTTT | TCTAGT | 2133 |
| | | | | | | | CCTTTTAT | | |
| 53 | SLUCAS9KH | E53SLCas9KH1 | 31679353 | 31679379 | + | 201 | AAAGGTATCTTTGA | TTGG | 13 |
| | | | | | | | TACTAACC | | |
| 53 | SLUCAS9KH | E53SLCas9KH2 | 31679373 | 31679399 | + | 202 | CCTTGGTTTCTGTG | TTGG | 51 |
| | | | | | | | ATTTTCTT | | |
| 53 | SLUCAS9KH | E53SLCas9KH3 | 31679391 | 31679417 | + | 2075 | TCTTTTGGATTGCA | ATAG | 18 |
| | | | | | | | TCTACTGT | | |
| 53 | SLUCAS9KH | E53SLCas9KH4 | 31679392 | 31679418 | + | 203 | CTTTTGGATTGCAT | TAGG | 12 |
| | | | | | | | CTACTGTA | | |
| 53 | SLUCAS9KH | E53SLCas9KH5 | 31679393 | 31679419 | + | 204 | TTTTGGATTGCATC | AGGG | 15 |
| | | | | | | | TACTGTAT | | |
| 53 | SLUCAS9KH | E53SLCas9KH6 | 31679414 | 31679440 | + | 2076 | TAGGGACCCTCCTT | CAAG | 11 |
| | | | | | | | CCATGACT | | |
| 53 | SLUCAS9KH | E53SLCas9KH7 | 31679419 | 31679445 | + | 205 | ACCCTCCTTCCATG | TTGG | 11 |
| | | | | | | | ACTCAAGC | | |
| 53 | SLUCAS9KH | E53SLCas9KH8 | 31679425 | 31679451 | + | 206 | CTTCCATGACTCAA | CTGG | 10 |
| | | | | | | | GCTTGGCT | | |
| 53 | SLUCAS9KH | E53SLCas9KH9 | 31679436 | 31679462 | + | 2077 | CAAGCTTGGCTCTG | TAAG | 16 |
| | | | | | | | GCCTGTCC | | |
| 53 | SLUCAS9KH | E53SLCas9KH10 | 31679446 | 31679472 | + | 2078 | TCTGGCCTGTCCTA | TCAG | 18 |
| | | | | | | | AGACCTGC | | |
| 53 | SLUCAS9KH | E53SLCas9KH11 | 31679458 | 31679484 | + | 2079 | TAAGACCTGCTCAG | TTAG | 16 |
| | | | | | | | CTTCTTCC | | |
| 53 | SLUCAS9KH | E53SLCas9KH12 | 31679465 | 31679491 | + | 2080 | TGCTCAGCTTCTTC | CCAG | 24 |
| | | | | | | | CTTAGCTT | | |
| 53 | SLUCAS9KH | E53SLCas9KH13 | 31679511 | 31679537 | + | 207 | ACATTTCATTCAAC | CCGG | 15 |
| | | | | | | | TGTTGCCT | | |
| 53 | SLUCAS9KH | E53SLCas9KH14 | 31679519 | 31679545 | + | 2081 | TTCAACTGTTGCCT | GAAG | 6 |
| | | | | | | | CCGGTTCT | | |
| 53 | SLUCAS9KH | E53SLCas9KH15 | 31679520 | 31679546 | + | 208 | TCAACTGTTGCCTC | AAGG | 4 |
| | | | | | | | CGGTTCTG | | |
| 53 | SLUCAS9KH | E53SLCas9KH16 | 31679564 | 31679590 | + | 2082 | CACTGATTCTGAAT | CTAG | 32 |
| | | | | | | | TCTTTCAA | | |
| 53 | SLUCAS9KH | E53SLCas9KH17 | 31679572 | 31679598 | + | 2083 | CTGAATTCTTTCAA | AAAG | 71 |
| | | | | | | | CTAGAATA | | |
| 53 | SLUCAS9KH | E53SLCas9KH18 | 31679573 | 31679599 | + | 209 | TGAATTCTTTCAAC | AAGG | 48 |
| | | | | | | | TAGAATAA | | |
| 53 | SLUCAS9KH | E53SLCas9KH19 | 31679589 | 31679615 | + | 2084 | GAATAAAAGGAAAA | ATAG | 574 |
| | | | | | | | ATAAATAT | | |
| 53 | SLUCAS9KH | E53SLCas9KH20 | 31679592 | 31679618 | + | 2085 | TAAAAGGAAAAATA | GTAG | 765 |
| | | | | | | | AATATATA | | |
| 53 | SLUCAS9KH | E53SLCas9KH21 | 31679361 | 31679387 | − | 2086 | CACAGAAACCAAGG | AAAG | 6 |
| | | | | | | | TTAGTATC | | |
| 53 | SLUCAS9KH | E53SLCas9KH22 | 31679369 | 31679395 | − | 2087 | AAGAAAATCACAGA | TTAG | 88 |
| | | | | | | | AACCAAGG | | |
| 53 | SLUCAS9KH | E53SLCas9KH23 | 31679373 | 31679399 | − | 210 | CCAAAAGAAAATCA | AAGG | 52 |
| | | | | | | | CAGAAACC | | |
| 53 | SLUCAS9KH | E53SLCas9KH24 | 31679374 | 31679400 | − | 2088 | TCCAAAAGAAAATC | CAAG | 75 |
| | | | | | | | ACAGAAAC | | |
| 53 | SLUCAS9KH | E53SLCas9KH25 | 31679382 | 31679408 | − | 2089 | AGATGCAATCCAAA | ACAG | 89 |
| | | | | | | | AGAAAATC | | |
| 53 | SLUCAS9KH | E53SLCas9KH26 | 31679392 | 31679418 | − | 2090 | CCTATACAGTAGAT | AAAG | 4 |
| | | | | | | | GCAATCCA | | |
| 53 | SLUCAS9KH | E53SLCas9KH27 | 31679406 | 31679432 | − | 2091 | ATGGAAGGAGGGTC | GTAG | 8 |
| | | | | | | | CCTATACA | | |
| 53 | SLUCAS9KH | E53SLCas9KH28 | 31679409 | 31679435 | − | 2092 | GTCATGGAAGGAGG | ACAG | 12 |
| | | | | | | | GTCCCTAT | | |
| 53 | SLUCAS9KH | E53SLCas9KH29 | 31679420 | 31679446 | − | 211 | GCCAAGCTTGAGTC | AGGG | 10 |
| | | | | | | | ATGGAAGG | | |
| 53 | SLUCAS9KH | E53SLCas9KH30 | 31679421 | 31679447 | − | 212 | AGCCAAGCTTGAGT | GAGG | 21 |
| | | | | | | | CATGGAAG | | |
| 53 | SLUCAS9KH | E53SLCas9KH31 | 31679422 | 31679448 | − | 2093 | GAGCCAAGCTTGAG | GGAG | 14 |
| | | | | | | | TCATGGAA | | |
| 53 | SLUCAS9KH | E53SLCas9KH32 | 31679424 | 31679450 | − | 213 | CAGAGCCAAGCTTG | AAGG | 18 |
| | | | | | | | AGTCATGG | | |
| 53 | SLUCAS9KH | E53SLCas9KH33 | 31679425 | 31679451 | − | 2094 | CCAGAGCCAAGCTT | GAAG | 18 |
| | | | | | | | GAGTCATG | | |
| 53 | SLUCAS9KH | E53SLCas9KH34 | 31679428 | 31679454 | − | 214 | AGGCCAGAGCCAAG | ATGG | 23 |
| | | | | | | | CTTGAGTC | | |
| 53 | SLUCAS9KH | E53SLCas9KH35 | 31679434 | 31679460 | − | 2095 | TAGGACAGGCCAGA | TGAG | 17 |
| | | | | | | | GCCAAGCT | | |
| 53 | SLUCAS9KH | E53SLCas9KH36 | 31679440 | 31679466 | − | 2096 | AGGTCTTAGGACAG | CAAG | 23 |
| | | | | | | | GCCAGAGC | | |
| 53 | SLUCAS9KH | E53SLCas9KH37 | 31679445 | 31679471 | − | 2097 | TGAGCAGGTCTTAG | AGAG | 27 |
| | | | | | | | GACAGGCC | | |
| 53 | SLUCAS9KH | E53SLCas9KH38 | 31679447 | 31679473 | − | 2098 | GCTGAGCAGGTCTT | CCAG | 35 |
| | | | | | | | AGGACAGG | | |
| 53 | SLUCAS9KH | E53SLCas9KH39 | 31679451 | 31679477 | − | 215 | AGAAGCTGAGCAGG | CAGG | 44 |
| | | | | | | | TCTTAGGA | | |
| 53 | SLUCAS9KH | E53SLCas9KH40 | 31679452 | 31679478 | − | 2099 | AAGAAGCTGAGCAG | ACAG | 16 |
| | | | | | | | GTCTTAGG | | |
| 53 | SLUCAS9KH | E53SLCas9KH41 | 31679456 | 31679482 | − | 216 | AAGGAAGAAGCTGA | TAGG | 53 |
| | | | | | | | GCAGGTCT | | |
| 53 | SLUCAS9KH | E53SLCas9KH42 | 31679457 | 31679483 | − | 2100 | TAAGGAAGAAGCTG | TTAG | 25 |
| | | | | | | | AGCAGGTC | | |
| 53 | SLUCAS9KH | E53SLCas9KH43 | 31679463 | 31679489 | − | 217 | GGAAGCTAAGGAAG | CAGG | 70 |
| | | | | | | | AAGCTGAG | | |
| 53 | SLUCAS9KH | E53SLCas9KH44 | 31679464 | 31679490 | − | 2101 | TGGAAGCTAAGGAA | GCAG | 52 |
| | | | | | | | GAAGCTGA | | |
| 53 | SLUCAS9KH | E53SLCas9KH45 | 31679467 | 31679493 | − | 2102 | GGCTGGAAGCTAAG | TGAG | 41 |
| | | | | | | | GAAGAAGC | | |
| 53 | SLUCAS9KH | E53SLCas9KH46 | 31679472 | 31679498 | − | 2103 | ACAATGGCTGGAAG | GAAG | 27 |
| | | | | | | | CTAAGGAA | | |
| 53 | SLUCAS9KH | E53SLCas9KH47 | 31679475 | 31679501 | − | 2104 | AACACAATGGCTGG | GAAG | 18 |
| | | | | | | | AAGCTAAG | | |
| 53 | SLUCAS9KH | E53SLCas9KH48 | 31679478 | 31679504 | − | 218 | TTCAACACAATGGC | AAGG | 87 |
| | | | | | | | TGGAAGCT | | |
| 53 | SLUCAS9KH | E53SLCas9KH49 | 31679479 | 31679505 | − | 2105 | ATTCAACACAATGG | TAAG | 24 |
| | | | | | | | CTGGAAGC | | |
| 53 | SLUCAS9KH | E53SLCas9KH50 | 31679484 | 31679510 | − | 2106 | AAAGGATTCAACAC | GAAG | 12 |
| | | | | | | | AATGGCTG | | |
| 53 | SLUCAS9KH | E53SLCas9KH51 | 31679487 | 31679513 | − | 219 | GTTAAAGGATTCAA | CTGG | 12 |
| | | | | | | | CACAATGG | | |
| 53 | SLUCAS9KH | E53SLCas9KH52 | 31679491 | 31679517 | − | 220 | AAATGTTAAAGGAT | ATGG | 37 |
| | | | | | | | TCAACACA | | |
| 53 | SLUCAS9KH | E53SLCas9KH53 | 31679505 | 31679531 | − | 221 | GCAACAGTTGAATG | AAGG | 28 |
| | | | | | | | AAATGTTA | | |
| 53 | SLUCAS9KH | E53SLCas9KH54 | 31679506 | 31679532 | − | 2107 | GGCAACAGTTGAAT | AAAG | 25 |
| | | | | | | | GAAATGTT | | |
| 53 | SLUCAS9KH | E53SLCas9KH55 | 31679524 | 31679550 | − | 2108 | AACACCTTCAGAAC | ACAG | 7 |
| | | | | | | | CGGAGGCA | | |
| 53 | SLUCAS9KH | E53SLCas9KH56 | 31679530 | 31679556 | − | 222 | TACAAGAACACCTT | GAGG | 10 |
| | | | | | | | CAGAACCG | | |
| 53 | SLUCAS9KH | E53SLCas9KH57 | 31679531 | 31679557 | − | 2109 | GTACAAGAACACCT | GGAG | 10 |
| | | | | | | | TCAGAACC | | |
| 53 | SLUCAS9KH | E53SLCas9KH58 | 31679533 | 31679559 | − | 223 | AAGTACAAGAACAC | CCGG | 17 |
| | | | | | | | CTTCAGAA | | |
| 53 | SLUCAS9KH | E53SLCas9KH59 | 31679539 | 31679565 | − | 2110 | GGGATGAAGTACAA | TCAG | 18 |
| | | | | | | | GAACACCT | | |
| 53 | SLUCAS9KH | E53SLCas9KH60 | 31679550 | 31679576 | − | 2111 | TCAGAATCAGTGGG | CAAG | 27 |
| | | | | | | | ATGAAGTA | | |
| 53 | SLUCAS9KH | E53SLCas9KH61 | 31679556 | 31679582 | − | 2112 | AAGAATTCAGAATC | GAAG | 27 |
| | | | | | | | AGTGGGAT | | |
| 53 | SLUCAS9KH | E53SLCas9KH62 | 31679562 | 31679588 | − | 224 | AGTTGAAAGAATTC | TGGG | 95 |
| | | | | | | | AGAATCAG | | |
| 53 | SLUCAS9KH | E53SLCas9KH63 | 31679563 | 31679589 | − | 225 | TAGTTGAAAGAATT | GTGG | 33 |
| | | | | | | | CAGAATCA | | |
| 53 | SLUCAS9KH | E53SLCas9KH64 | 31679566 | 31679592 | − | 2113 | TTCTAGTTGAAAGA | TCAG | 43 |
| | | | | | | | ATTCAGAA | | |
| 53 | SLUCAS9KH | E53SLCas9KH65 | 31679572 | 31679598 | − | 2114 | CTTTTATTCTAGTT | TCAG | 61 |
| | | | | | | | GAAAGAAT | | |
| 53 | SLUCAS9KH | E53SLCas9KH66 | 31679579 | 31679605 | − | 2115 | ATTTTTCCTTTTAT | AAAG | 122 |
| | | | | | | | TCTAGTTG | | |
| 53 | SLUCAS9KH | E53SLCas9KH67 | 31679586 | 31679612 | − | 2116 | TATATTTATTTTTC | CTAG | 978 |
| | | | | | | | CTTTTATT | | |

[0194] In some embodiments, the AAV vectors and/or compositions thereof comprise a single nucleic acid molecule comprising: i) a nucleic acid encoding Staphylococcus aureus Cas9 (SaCas9) or Staphylococcus lugdunensis (SluCas9) and at least one, at least two, or at least three guide RNAs; or ii) a nucleic acid encoding Staphylococcus aureus Cas9 (SaCas9) or Staphylococcus lugdunensis (SluCas9) and from one to n guide RNAs, wherein n is no more than the maximum number of guide RNAs that can be expressed from said nucleic acid; or iii) a nucleic acid encoding Staphylococcus aureus Cas9 (SaCas9) or Staphylococcus lugdunensis (SluCas9) and one to three guide RNAs.

[0195] In some embodiments, the AAV vectors and/or compositions thereof comprises at least two nucleic acid molecules comprising a first nucleic acid encoding Staphylococcus aureus Cas9 (SaCas9) or Staphylococcus lugdunensis (SluCas9); and a second nucleic acid that does not encode a SaCas9 or SluCas9 and encodes any one of i) at least one, at least two, at least three, at least four, at least five, or at least six guide RNAs; or ii) from one to n guide RNAs, wherein n is no more than the maximum number of guide RNAs that can be expressed from said nucleic acid; or iii) from one to six guide RNAs.

[0196] In some embodiments, the AAV vectors and/or compositions thereof comprises at least two nucleic acid molecules comprising a first nucleic acid encoding Staphylococcus aureus Cas9 (SaCas9) or Staphylococcus lugdunensis (SluCas9) and i) at least one, at least two, or at least three guide RNAs; or ii) from one to n guide RNAs, wherein n is no more than the maximum number of guide RNAs that can be expressed from said nucleic acid; or iii) one to three guide RNAs; and a second nucleic acid that does not encode a SaCas9 or SluCas9, optionally wherein the second nucleic acid comprises any one of i) at least one, at least two, at least three, at least four, at least five, or at least six guide RNAs; or ii) from one to n guide RNAs, wherein n is no more than the maximum number of guide RNAs that can be expressed from said nucleic acid; or iii) from one to six guide RNAs.

[0197] In some embodiments, the AAV vectors and/or compositions thereof comprises at least two nucleic acid molecules comprising a first nucleic acid encoding Staphylococcus aureus Cas9 (SaCas9) or Staphylococcus lugdunensis (SluCas9) and at least one, at least two, or at least three guide RNAs; and a second nucleic acid that does not encode a SaCas9 or SluCas9 and encodes from one to six guide RNAs.

[0198] In some embodiments, the AAV vectors and/or compositions thereof comprises at least two nucleic acid molecules comprising a first nucleic acid encoding Staphylococcus aureus Cas9 (SaCas9) or Staphylococcus lugdunensis (SluCas9) and at least two guide RNAs, wherein at least one guide RNA binds upstream of sequence to be excised and at least one guide RNA binds downstream of sequence to be excised; and a second nucleic acid that does not encode a SaCas9 or SluCas9 and encodes at least one additional copy of the guide RNAs encoded in the first nucleic acid. In some embodiments, the guide RNA excises a portion of a DMD gene, optionally an exon, intron, or exon/intron junction.

[0199] In some embodiments, a composition is provided comprising, consisting of, or consisting essentially of at least two nucleic acid molecules comprising a first nucleic acid encoding Staphylococcus aureus Cas9 (SaCas9) or Staphylococcus lugdunensis (SluCas9) and a first and a second guide RNA that function to excise a portion of a DMD gene; and a second nucleic acid encoding at least 2 or at least 3 copies of the first guide RNA and at least 2 or at least 3 copies of the second guide RNA.

[0200] In some embodiments, a composition is provided comprising, consisting of, or consisting essentially of one or more nucleic acid molecules encoding an endonuclease and a pair of guide RNAs, wherein each guide RNA targets a different sequence in a DMD gene, wherein the endonuclease and pair of guide RNAs are capable of excising a target sequence in DNA that is between 5-250 nucleotides in length. In some embodiments, the endonuclease is a class 2, type II Cas endonuclease. In some embodiments, the class 2, type II Cas endonuclease is SpCas9, SaCas9, or SluCas9. In some embodiments, the endonuclease is not a class 2, type V Cas endonuclease. In some embodiments, the excised target sequence comprises a splice acceptor site or a splice donor site. In some embodiments, the excised target sequence comprises a premature stop codon in the DMD gene. In some embodiments, the excised target sequence does not comprise an entire exon of the DMD gene. In some embodiments, any of the methods and/or ribonucleoprotein complexes disclosed herein do not destroy/specifically alter the sequence of a splice acceptor site, splice donor site, or premature stop codon site.

### III. Methods

[0201] Disclosed herein are methods comprising (a) administering to a subject an agent that blocks AAV binding to an AAV receptor (AAVR) in the liver, and then (b) administering an AAV vector to the subject.

[0202] Disclosed herein are methods comprising increasing the percentage of AAV delivered to a non-liver target in a subject, comprising (a) a pre-conditioning step comprising administering to the subject a composition comprising an agent that blocks AAV binding to an AAV receptor (AAVR) in the liver, and then (b) administering an AAV vector targeting a non-liver tissue. Including such a composition, for example, in a conditioning or pre-conditioning regimen could reduce liver infectivity, protect liver health, and increase potency to target tissues.

[0203] The methods disclosed herein may be used to improve the tropism of an AAV for a non-liver target in a subject, comprising administering to the subject a composition comprises an agent that blocks AAV binding to an AAV receptor (AAVR) and a delivery molecule that delivers the agent to the liver, and then administering an AAV vector, wherein the AAV vector is not intended to target liver.

[0204] The methods disclosed herein may also be used to decrease tropism of AAV to the liver in a subject comprising administering to the subject a composition comprises an agent that blocks AAV binding to an AAV receptor (AAVR) comprising a small or large molecule and a delivery molecule that delivers the agent to the liver, and then administering an AAV vector, wherein the AAV vector is not intended for the liver. In some embodiments, administration of the composition comprising the agent that blocks AAV binding to an AAV receptor increases the percentage of AAV delivered to the non-liver target.

[0205] In some embodiments, the methods comprise administering an agent that blocks AAV binding to an AAV receptor (AAVR) and a delivery molecule that delivers the agent to the liver and induces long term blocking of AAV binding to AAVR, e.g., longer than about 3 weeks. In some embodiments, the blocking of AAV binding to AAV receptors in the liver is not temporary. In some embodiments, the blocking of AAV binding to AAV receptors in the liver is temporary.

[0206] In some embodiments, administering to a subject in need thereof a composition for blocking AAV binding to AAV receptors in the liver occurs prior to administering the non-liver AAV-based gene therapy, for example at least about 3 weeks, at least about 4 weeks, at least about 5 weeks, at least about 6 weeks, at least about 7 weeks, at least about 8 weeks, at least about 9 weeks, or at least about 10 weeks prior to administering the AAV. In particular embodiments, the agent that blocks binding to AAV receptors in the liver (e.g., any of the siRNAs or ASOs disclosed herein) is administered to the subject 1-2, 1-3, 2-5, 4-7, 6-9, 8-11, 10-13 or 12-15 days prior to administering any of the AAVs disclosed herein. In some embodiments, the composition that blocks AAV binding to an AAV receptor (AAVR) comprises an siRNA. In some embodiments, the composition that blocks AAV binding to an AAV receptor (AAVR) comprises an ASO. In some embodiments, the composition that blocks AAV binding to an AAV receptor (AAVR) comprises an anti-AAV antibody that blocks AAV binding to AAV receptors. In some embodiments, the composition that blocks AAV binding to an AAV receptor (AAVR) comprises a non-RNAi and non-antibody inhibitor. In some embodiments, the compositions comprise at least one small molecule inhibitor or anti-sense oligonucleotide.

[0207] As set forth in detail above, the compositions for blocking AAV binding to AAV receptors in the liver include but are not limited to compositions comprising RNAi specific for AAVR and compositions comprising antisense oligonucleotides (ASOs) targeting an AAVR-encoding transcript.

[0208] In some embodiments, systemically or locally delivered siRNA induces a temporary gene expression knockdown effect by up to 90% from 48 hours to 3 weeks in animal experiments for eyes, brain, spinal cord, lungs, subcutaneous tissue, vagina, skin, isolated tumor, heart et al. See Kim, Korean J Anesthesiol. 59(6): 369-370 (2010). Small interfering RNA targeted to the liver, including by way of conjugated siRNA and siRNA-LNP targeted delivery, can temporarily block AAV binding to AAVRs in the liver. After the siRNA targeted to the liver is administered and temporary blocking of the AAVR is induced, non-liver AAV-based gene therapy can be administered.

[0209] In some embodiments, systemically or locally delivered ASOs are delivered to induce a temporary gene expression knockdown effect of about 50%, about 60%, about 70%, or about 80% from about 24 hours to about 48 hours to greater than or about 10 days in accordance with the Examples and Figures presented herein. After the ASO is administered and temporary knockdown of the AAVR is induced, non-liver AAV-based gene therapy can be administered.

[0210] The non-liver AAV-based gene therapy is enhanced because the gene therapy can be more effectively routed to the intended target by way of the decreased AAV tropism to the liver. Because AAVR have been shown to contribute significantly to AAV vector transduction efficiency and tropism and have been shown to bind directly to AAV particles and to be rate limiting for viral transduction, blocking the AAVR lessens the tropism of AAV to those cells (e.g., hepatocytes). By decreasing AAV tropism to the liver, the non-liver AAV-based gene therapy is enhanced or improved because of the lowered risk of off-target liver toxicity. Accordingly in some embodiments, administering to the subject administering an agent that blocks AAV binding to an AAV receptor (AAVR) temporarily blocks AAV binding to AAV receptors in the liver. In some embodiments, a subject who is a) treated with an agent that blocks AAV binding to an AAV receptor (AAVR) and b) subsequently treated with an AAV, displays a reduction of at least 10%, 20%, 30%, 40%, 50%, 60%, 70%, 80%, 90%, 95%, or 99% in levels of AAV within the liver as compared to a subject who is treated with the AAV but not treated with the agent.

[0211] In some embodiments, the method includes administering an siRNA or ASO that is capable of temporarily blocking AAV binding to AAVR receptors in the liver, including for about 48 hours to 3 weeks. In some embodiments, the siRNA or ASO blocks AAV binding to AAVR receptors in the liver for about 2 days, about 3 days, about 4 days, about 5 days, about 6 days, about 7 days, about 8 days, about 9 days, about 10 days, about 11 days, about 12 days, about 13 days, about 14 days, about 15 days, about 16, days, about 17 days, about 18 days, about 19 days, about 20 days, or about 21 days. In some embodiments, the siRNA or ASO blocks AAV binding to AAVR receptors in the liver for about 7 days, about 8 days, about 9 days, about 10 days, about 11 days, about 12 days, about 13 days, about 14 days. In some embodiments, the compositions are capable of blocking AAV binding to AAVR receptors in the liver for 1-28 days, 2-28 days, 3-28 days, 7-28 days, 10-28 days, 14-28 days, 21-28 days, 1-21 days, 2-21 days, 3-21 days, 7-21 days, 10-21 days, 14-21 days, 1-14 days, 2-14 days, 3-14 days, 7-14 days, 1-10 days, 2-10 days, 3-10 days, 7-10 days, 1-7 days, 2-7 days, 3-7 days, 1-4 days, 1-3 days, or about 24 hours to about 48 hours.

[0212] In some embodiments, the siRNA or ASO knocks down AAVR and comprises a ribonucleotide sequence at least 80% identical to a ribonucleotide sequence from the AAVR. Preferably, the siRNA or ASO molecule is at least 90%, 95%, 96%, 97%, 98%, 99% or 100% identical to the ribonucleotide sequence of the target. Most preferably, an siRNA or ASO will be 100% identical to the nucleotide sequence of a target agent or virus. However, siRNA or ASO molecules with insertions, deletions or single point mutations relative to a target may also be effective. Tools to assist siRNA design or ASO design are readily available to the public and are known in the art.

[0213] In some embodiments, the subject is administered an amount of an siRNA that knocks down the levels of AAVR in the liver by at least 10%, 20%, 30%, 40%, 50%, 60%, 70%, 80%, 90%, 95%, or 99% as compared to a control subject not administered the siRNA. In some embodiments, the subject is administered an amount of the siRNA that knocks down the levels of AAVR in the liver by 80-100%, 80-95%, 10-90%, 10-70%, 10-50%, 10-30%, 30-90%, 30-70%, 30-50%, 50-90%, 50-70%, or 70-90% as compared to a control subject not administered the siRNA.

[0214] In some embodiments, the subject is administered an amount of the siRNA that knocks down the levels of AAVR in the liver for 1-28 days, 2-28 days, 3-28 days, 7-28 days, 10-28 days, 14-28 days, 21-28 days, 1-21 days, 2-21 days, 3-21 days, 7-21 days, 10-21 days, 14-21 days, 1-14 days, 2-14 days, 3-14 days, 7-14 days, 1-10 days, 2-10 days, 3-10 days, 7-10 days, 1-7 days, 2-7 days, 3-7 days, 1-4 days, 1-3 days, or about 24 hours to about 48 hours.

[0215] In some embodiments, the subject is administered an amount of an ASO that knocks down the levels of AAVR in the liver by at least 10%, 20%, 30%, 40%, 50%, 60%, 70%, 80%, 90%, 95%, or 99% as compared to a control subject not administered the ASO. In some embodiments, the subject is administered an amount of an ASO that knocks down the levels of AAVR in the liver by 80-100%, 80-95%, 10-90%, 10-70%, 10-50%, 10-30%, 30-90%, 30-70%, 30-50%, 50-90%, 50-70%, or 70-90% as compared to a control subject not administered the ASO.

[0216] In some embodiments, the subject is administered an amount of the ASO that knocks down the levels of AAVR in the liver for 1-28 days, 2-28 days, 3-28 days, 7-28 days, 10-28 days, 14-28 days, 21-28 days, 1-21 days, 2-21 days, 3-21 days, 7-21 days, 10-21 days, 14-21 days, 1-14 days, 2-14 days, 3-14 days, 7-14 days, 1-10 days, 2-10 days, 3-10 days, 7-10 days, 1-7 days, 2-7 days, 3-7 days, 1-4 days, 1-3 days, or about 24 hours to about 48 hours. In some embodiments, the subject is administered an amount of the ASO that knocks down the levels of AAVR in the liver for 1-14 days, 2-14 days, 3-14 days, 7-14 days, 1-10 days, 2-10 days, 3-10 days, 7-10 days, 1-7 days, 2-7 days, 3-7 days, 1-4 days, 1-3 days, or about 24 hours to about 48 hours.

[0217] In some embodiments, the method includes administering an agent that blocks AAV binding to an AAV receptor (AAVR), e.g., siRNA or ASO, that is conjugated to a liver-targeting moiety. In some embodiments, the method enhances their delivery and/or uptake by the liver. In some embodiments, the method includes administering siRNA or ASO conjugated to a lipid, such as cholesterol. In some embodiments, the method includes administering siRNA or ASO conjugated to at least one galactose or galactose derivative, including but not limited to lactose, galactose, N-acetylgalactosamine (GalNAc), galactosamine, N-formylgalactosamine, N-acetylgalactosamine, N-propionylgalactosamine, Nn-butanoylgalactosamine, and N-isobutanoyl-galactosamine (Iobst, S T and Drickamer, K. JBC 1996, 271, 6686). In some embodiments, the method includes administering GalNAc-conjugated siRNAs.

[0218] In some embodiments, the method includes administering a composition comprising an agent that blocks AAV binding to an AAV receptor (AAVR) delivered by non-viral tissue-specific delivery vehicles including but not limited to nanoparticles, liposomes, ribonucleoproteins, positively charged peptides, small molecule RNA-conjugates, aptamer-RNA chimeras, and RNA-fusion protein complexes. In some embodiments, the agent is delivered to a cell or a patient by a lipid nanoparticle (LNP). In some embodiments, the method includes administering a composition comprising a siRNA encapsulated in a LNP. In some embodiments, the agent is delivered to a cell or a patient without being conjugated and/or without a non-viral tissue-specific delivery vehicle. In some embodiments, the method includes administering a composition comprising an ASO and a pharmaceutically acceptable carrier, for example, phosphate-buffered saline (PBS).

[0219] Exemplary modes of administration of the composition for blocking AAV binding to AAV receptors in the liver, e.g., a conjugated siRNA or siRNA-LNP delivery system or ASO, include oral administration, parenteral administration, administration by injection (e.g., intravenous, subcutaneous, intramuscular, intrathecal (IT), intracerebroventricular (ICV), etc.), and any other suitable mode of administration. In some embodiments, administration of the agent for blocking AAV binding to AAV receptors in the liver (e.g., siRNA or ASO) and compositions thereof include intraocular administration, such as intravitreal, intraretinal, subretinal, subtenon, peri- and retro-orbital, trans-comeal and trans-scleral administration. In some embodiments, the agent may be administered to a patient by intravenous injection, subcutaneous injection, oral delivery, liposome delivery or intranasal delivery. The agent may then accumulate in a target body system, organ, tissue or cell type of the patient.

[0220] In some embodiments, other drugs that facilitate increased uptake of an agent (e.g., siRNA) in the liver may also be co-administered with the agent (e.g., siRNA) conjugated to a liver-targeting moiety. In some embodiments, the method comprises co-administering a cholesterol-conjugated agent (e.g., siRNA) with a statin drug to block AAV binding to AAVR in the liver. In some embodiments, a statin drug can be co-administered with the cholesterol-agent to enhance uptake of cholesterol-conjugated agent in the liver. See US20150361432A1 for a general discussion regarding co-administering statin drugs with cholesterol-siRNA to increase the expression of LDL receptors on the surface of liver hepatocytes. As a consequence of the increase in LDL receptor expression, the level of cholesterol is lowered in plasma. Without wishing to be bound by theory, by administering a statin drug, the level of competing cholesterol in plasma is reduced and the level of LDL receptors for binding cholesterol-agent in the liver are increased, allowing for more efficient uptake of cholesterol labeled agent by hepatocytes. The statin can be administered before, with or after the administration of the cholesterol-agent.

[0221] In some embodiments, the method includes administering an AAV vector, including any of the AAV vectors described herein. In some embodiments, the AAV vector targets a non-liver tissue. In some embodiments, the method comprises administering to a subject the composition comprising an agent that blocks AAV binding to an AAV receptor (AAVR) as part of the pre-conditioning treatment prior to receiving or administering the AAV vector or AAV-based gene therapy directed to the non-liver target tissue. In some embodiments, the composition for blocking AAV binding to AAV receptors in the liver is administered to a subject at least once before the administration of the AAV Vector or AAV-based gene therapy directed to the non-liver target tissue. In some embodiments, the composition for blocking AAV binding to AAV receptors in the liver is administered to a subject at least once before the AAV-based gene therapy as part of a pre-conditioning regimen that may include administering other agents.

[0222] In particular embodiments, the subject is not administered an agent that blocks AAV binding to an AAV vector at the same time as being administered an AAV.

[0223] In some embodiments, the disclosure provides for administering to a subject the composition comprising an agent that blocks AAV binding to an AAV receptor (AAVR) (e.g., siRNA or ASO) about 2 days, about 3 days, about 4 days, about 5 days, about 6 days, about 7 days, about 8 days, about 9 days, about 10 days, about 11 days, about 12 days, about 13 days, about 14 days, about 15 days, about 16, days, about 17 days, about 18 days, about 19 days, about 20 days, or about 21 days prior to administering the AAV vector. In some embodiments, the disclosure provides for administering to a subject the composition comprising an agent that blocks AAV binding to an AAV receptor (AAVR) occurs about 2-21, 10-21, 14-21, 2-17, 10-17, 1-14 days, 2-14 days, 3-14 days, 7-14 days, 1-10 days, 2-10 days, 3-10 days, 7-10 days, 1-7 days, 2-7 days, 3-7 days, 1-4 days, or 1-3 days, or about 24 hours to about 48 hours prior to administering the AAV vector. In some embodiments, administering the composition comprising an agent that blocks AAV binding to an AAV receptor (AAVR) occurs about 1 day, about 2 days, about 3 days, about 4 days, about 5 days, about 6 days, about 7 days, about 8 days, about 9 days, about 10 days, about 11 days, about 12 days, about 13 days, or about 14 days prior to administering the AAV vector. In some embodiments, administering the composition comprising an agent that blocks AAV binding to an AAV receptor (AAVR) occurs about 24 hours to about 48 hours prior to administering the AAV vector. In some embodiments, the subject is administered more than one dose (e.g., 2, 3 or 4) of the agent that blocks AAV binding to the AAVR prior to being administered the AAV.

[0224] In some embodiments, administering the composition comprising an agent that blocks AAV binding to an AAV receptor (AAVR) (e.g., siRNA or ASO) immediately precedes administering the AAV vector targeting a non-liver tissue. In some embodiments, the composition comprising an agent that blocks AAV binding to an AAV receptor (AAVR) and the AAV vector are co-administered.

[0225] The non-liver AAV-based gene therapy includes treating or preventing a disease or disorder, such as a genetic disease or disorder, in a subject in need thereof that is not a disease or disorder of the liver. In some embodiments, the AAV vector is intended for the brain; central nervous system; spinal cord; eye; retina; bone; cardiac muscle, skeletal muscle, and/or smooth muscle; lung; pancreas; heart; and/or kidney. In some embodiments, the AAV vector is intended for cardiac muscle, skeletal muscle, and/or smooth muscle.

[0226] In some embodiments, the method results in an increased percentage of AAV delivered to the non-liver target. In some embodiments, the method results in at least a 10%, 30%, 50%, 75%, 100%, 125%, 150%, 200%, 250%, 300%, 350%, 400%, 450%, 500%, 600%, 700%, 800%, 900%, or 1000% increase of AAV in brain, central nervous system, spinal cord, eye, retina, bone, cardiac muscle, skeletal muscle, and/or smooth muscle, lung, pancreas, heart, and/or kidney of the subject receiving the agent that blocks AAV binding to an AAV receptor (AAVR) in the liver and subsequently an AAV as compared to the AAV in the corresponding tissue of a control subject that received the AAV but did not receive the agent that blocks AAV binding to an AAV receptor (AAVR) in the liver. In some embodiments, the method results in a 10-50%, 50-100%, 100-250%, 250-500%, 500-750%, 750-1000%, or 1000-2000% increase of AAV in brain, central nervous system, spinal cord, eye, retina, bone, cardiac muscle, skeletal muscle, smooth muscle, lung, pancreas, heart, and/or kidney of the subject receiving the agent that blocks AAV binding to an AAV receptor (AAVR) in the liver and subsequently an AAV as compared to the AAV in the corresponding tissue of a control subject that received the AAV but did not receive the agent that blocks AAV binding to an AAV receptor (AAVR) in the liver. In some embodiments, the method results in at least a 10%, 30%, 50%, 75%, 100%, 125%, 150%, 200%, 250%, 300%, 350%, 400%, 450%, 500%, 600%, 700%, 800%, 900%, or 1000% increase of AAV in skeletal muscle of the subject receiving the agent that blocks AAV binding to an AAV receptor (AAVR) in the liver and subsequently an AAV, as compared to the AAV in the muscle of a control subject that received the AAV but did not receive the agent. In some embodiments, the method results in a 10-50%, 50-100%, 100-250%, 250-500%, 500-750%, 750-1000%, or 1000-2000% increase of AAV in skeletal muscle of the subject receiving the agent that blocks AAV binding to an AAV receptor (AAVR) in the liver and subsequently an AAV, as compared to the AAV in the muscle of a control subject that received the AAV but did not receive the agent.

[0227] In some embodiments, the non-liver AAV-based gene therapy is used to treat a genetic disease or disorder, where the disorder is a muscle disease or disorder. The muscle disease or disorder may be selected from, for example, Duchenne Muscular Dystrophy (DMD), Becker muscular dystrophy (BMD), Emery-Dreifuss dystrophy, myotonic dystrophy, limb-girdle muscular dystrophy, oculopharyngeal muscular dystrophy, congenital dystrophy, familial periodic paralysis. In some embodiments, the muscle disease or disorder may be mitochondrial oxidative phosphorylation disorder, or a glycogen storage disease (e.g., von Gierke's disease, Pompe's disease, Forbes-Cori disease, Andersen's disease, McArdle's disease, Hers' disease, Tarui's disease, or Fanconi-Bickel syndrome.) In particular embodiments, the non-liver AAV-based gene therapy is used to treat DMD. In some embodiments, the non-liver AAV-based gene therapy is used to treat myotonic dystrophy.

[0228] In some embodiments, the method includes administering a single AAV vector or multiple AAV vectors that have a non-liver target. In some embodiments, the method comprises administering an AAV1, AAV2, AAV3, AAV4, AAV5, AAV6, AAV7, AAV8, AAVrh10, AAVrh74, AAV9, AAV9P, or Myo-AAV vector. In some embodiments, the methods include administering AAV vectors that are recombinant or engineered AAV vectors. In some embodiments, the AAV vector comprises a tissue-specific (e.g., muscle-specific) promoter, e.g., which is operatively linked to a sequence encoding a guide RNA. In preferred embodiments, the AAV vector is less than 5 kb from ITR to ITR in size, inclusive of both ITRs. In particular embodiments, the AAV vector is less than 4.9 kb from ITR to ITR in size, inclusive of both ITRs. In further embodiments, the AAV vector is less than 4.85 kb from ITR to ITR in size, inclusive of both ITRs. In further embodiments, the AAV vector is less than 4.8 kb from ITR to ITR in size, inclusive of both ITRs. In further embodiments, the AAV vector is less than 4.75 kb from ITR to ITR in size, inclusive of both ITRs. In further embodiments, the AAV vector is less than 4.7 kb from ITR to ITR in size, inclusive of both ITRs. In some embodiments, the vector is between 3.9-5 kb, 4-5 kb, 4.2-5 kb, 4.4-5 kb, 4.6-5 kb, 4.7-5 kb, 3.9-4.9 kb, 4.2-4.9 kb, 4.4-4.9 kb, 4.7-4.9 kb, 3.9-4.85 kb, 4.2-4.85 kb, 4.4-4.85 kb, 4.6-4.85 kb, 4.7-4.85 kb, 4.7-4.9 kb, 3.9-4.8 kb, 4.2-4.8 kb, 4.4-4.8 kb or 4.6-4.8 kb from ITR to ITR in size, inclusive of both ITRs. In some embodiments, the vector is between 4.4-4.85 kb from ITR to ITR in size, inclusive of both ITRs. In some embodiments, the vector is an AAV9 vector.

[0229] In some embodiments, the AAV vectors and AAV based gene therapy involve administering CRISPR-Cas components, any of which are known in the art. In some embodiments, the method includes administering one or more AAV vectors comprising a nucleic acid encoding a Cas9 protein. Such embodiments include for example, one or more AAV vectors comprising a nucleic acid encoding Staphylococcus aureus (SaCas9) and/or Staphylococcus lugdunensis (SluCas9) and further comprising a nucleic acid encoding one or more guide RNAs. In such embodiments, the nucleic acid encoding the Cas9 protein is under the control of a CK8e promoter. In some embodiments, the nucleic acid encoding the guide RNA sequence is under the control of a hU6c promoter. In some embodiments, the vector is AAV9. In some embodiments, in addition to guide RNA and Cas9 sequences, the vectors further comprise nucleic acids that do not encode guide RNAs. In some embodiments, the vector comprises one or more nucleotide sequence(s) encoding a crRNA, a trRNA, or a crRNA and trRNA. A discussion of different AAV compositions useful in the present methods, including exemplary guide RNAs, promoters, and particular spacer sequences are disclosed in WO2022/056000 and elsewhere herein.

[0230] In particular embodiments, the non-liver target is the muscle and the method comprises administering an AAV vector to the subject subsequent to administering to a subject an agent that blocks AAV binding to an AAV receptor (AAVR) in the liver. In particular embodiments, the method comprises administering an AAV vector targeting the muscle subsequent to a pre-conditioning step comprising administering to the subject a composition comprising an agent that blocks AAV binding to an AAV receptor (AAVR) in the liver, wherein the pre-conditioning step increases the percentage of AAV delivered to the non-liver target. In particular embodiments, the non-liver AAV-based gene therapy is used to treat DMD. In such embodiments, the guide RNAs comprise as non-limiting examples the guide sequences disclosed in Tables 1A, 1B, and Table 2. For example, when the AAV vector comprises SaCas9, one or more spacer sequences is selected from any one of SEQ ID NOs: 1-35, 1000-1078, and 3000-3069; or when the AAV vector comprises SluCas9a, one or more spacer sequences selected from any one of SEQ ID NOs: 100-225, 2000-2116, and 4000-4251.

[0231] In some embodiments, the methods include administering AAV vectors that further comprise molecules for enhancing tropism for the target host cells or tissue. Uptake of AAVs by vascular endothelial and other target cell types can further be enhanced by using AAVs that further comprise one or more molecules for enhancing tropism of the vector for particular target host cells. In some embodiments, the one or more molecules for enhancing tropism are proteins. In some embodiments, the one or more molecules for enhancing tropism of the viral vector are peptides. In some embodiments, the one or more peptides target the viral vector to proteins upregulated in cells associated with the particular genetic disease or disorder to be treated. Such peptides and proteins are known in the art for enhancing tropism toward target host cells and may be incorporated into the AAVs through any of various methodologies known in the art.

[0232] Exemplary modes of administration of the non-liver AAV-based gene therapy include oral, rectal, transmucosal, topical, transdermal, inhalation, parenteral (e.g., intravenous, subcutaneous, intradermal, intramuscular, and intra-articular, as well as direct tissue or organ injection, alternatively, intrathecal, direct intramuscular, intraventricular, intravenous, intraperitoneal, intranasal, or intraocular injections. Injectables can be prepared in conventional forms, either as liquid solutions or suspensions, solid forms suitable for solution or suspension in liquid prior to injection, or as emulsions. Alternatively, the virus may be administered locally, for example in a depot or sustained-release formulation.

[0233] In some embodiments, the subject is a human subject. In some embodiments, the subject is being treated for a genetic disease or a disorder that is not a disease or disorder of the liver. In some embodiments, the subject is being treated for a muscle disease or disorder. In some embodiments, the subject has been or is being treated with a non-liver AAV-based gene therapy.

### EXAMPLES

[0234] The following examples are provided to illustrate certain disclosed embodiments and are not to be construed as limiting the scope of this disclosure in any way.

### 1. Example 1: Study of the Effect of Anti-AAVR siRNA on AAV Infectivity in Cell Models

[0235] To evaluate the effects of anti-AAVR siRNA and ASO administration on AAV infectivity in liver cells, liver cell models were transfected with either a siRNA targeting AAVR (anti-AAVR siRNA), an ASO, or a control. Cells were lysed for mRNA and protein extraction followed by qRT-PCR (mRNA) analysis and Western Blot analysis (protein) to assess the degree of AAVR mRNA knockdown.

### a) Dose Response (CRO):

[0236] Hepa1-6 cells were seeded at a density of 20 k cells per well in 96-well tissue culture plates. Cells were immediately transfected with siRNAs targeting mmAu040320 (mouse AAVR gene) at 10 different doses using Lipofectamine 2000 (Invitrogen 11668027). A Quantigene 2.0 branched DNA (bDNA) probe set was designed for the target mRNAs. Relative mmAu040320/mmGAPDH ratios were normalized to the respective mean ratio in mock treated cells and cells were transfected with a control siRNA targeting.

[0237] FIGS. 1A-1J show the effects of siRNA concentration on relative mRNA expression and shows 10-point dose response curves for each of the 10 siRNA sequences evaluated, set forth in Tables A1-A3. The top performing mmAu040320-targeting siRNAs were used in subsequent studies.

b) Knockdown of AAVR in Mouse Myoblasts with ASOs and siRNA:

[0238] C2C12 (mouse myoblast) cells were seeded at 14.4 k per well in a 96-well tissue culture plate. Next-day cells were treated with 50 nM ASO or 10 nM siRNA formulated with RNAiMax following manufacturer's protocol. After 48 hours, cells were lysed using a Cells-to-CT kit, following manufacturer's protocol. mRNA levels were measured by TaqMan assay, in a multiplexed reaction, using beta actin as a housekeeping control gene for normalization across samples. qPCR was run on Quantstudio 6 flex using mastermix from a Cells-to-CT 1-step TaqMan Kit (Invitrogen A25603). 20 ul reactions were conducted in technical triplicates for each RNA sample according to the user manual. 2 ul of cell lysate was added to each reaction, and Taqman probes (mouse): AAVR: FAM Mm00460200_m1 and Act-B: VIC Mm02619580_g1 were used. Delta Delta Ct analysis was conducted to find fold change of the samples in relation to the untreated control samples.

[0239] FIG. 2 shows the amount of change normalized to untreated cells and B-Actin in the C2C12 (mouse myoblast) cells.

c) Knockdown of AAVR mRNA in Liver Cell Lines with siRNA and ASO

[0240] Huh7 cells were seeded at 15 k per well in a 96-well tissue culture plate and grown overnight in growth media DMEM supplemented with 10% FBS and PenStrap. The next-day cells were dosed with 10-200 nM for ASOs or siRNA controls (siRNAVT011 targeting AAVR positive control; and non-targeting siRNA as negative control). The ASO was mixed with Opti-MEM (GIBCO 31985062) and combined with a mixture of Lipofectamine RNAiMAx Transfection reagent (Invitrogen 13778150) and incubated for 15 min at room temperature, following manufacturer's protocol (www.thermofisher.com/order/catalog/product/13778150). Untreated cells were left until media change. Cells were lysed after 48 hrs for mRNA analysis. Cells were lysed using lysis buffer from Cells-to-CT 1-step TaqMan Kit (Invitrogen A25603). qPCR was run on Quantstudio 6 flex using mastermix from Cells-to-CT 1-step TaqMan Kit (Invitrogen A25603). 20 ul reactions were conducted in technical duplicates for each RNA sample according to the user manual. 2 ul of lysate was added to each reaction and Taqman probes (human): AAVR: FAM Hs00967343_m1 and Act-B: VIC Hs01060665_g1 were used. Delta Delta Ct analysis was conducted to find fold change in relation to the untreated control samples.

[0241] FIG. 3 shows the effect of AAVR knockdown by 7 different ASOs as compared to untreated Huh7 cells and negative and positive controls.

d) ASO Effect on AAVR mRNA and Protein in Liver Cell Lines

[0242] Cell treatment and harvesting: Samples were collected from 12-well plates. Cells were seeded at 15 k per well and grown overnight at 37° C. with 5% CO2. Cells were transfected with ASO (50 nM) or siRNA (10 nM) using RNAiMax Lipofectamine (Invitrogen 13778150), according to manufacturer procedure. Media was changed at 48 h and 168 h post dosing.

[0243] Samples were harvested at each time point. Cells were washed with DPBS and incubated with TrypLE™ Express Enzyme for 5 min in 37° C. with 5% CO2. Once detached, TrypLE was neutralized with DMEM and cells were transferred to a tube and pelleted for 5 min at 1000 rpm. Media was removed and cells were resuspended in 1 mL DPBS. 100 uL was moved to a new tube. Both new and original tubes were pelleted and DPBS was removed. A 100 uL tube was used for assessing mRNA, and a 900 uL tube was used for assessing protein, as further described below. Cell pellets were stored at −80° C. until processing.

[0244] Western blotting (protein): Pellets were resuspended in ice cold extraction buffer: RIPA buffer supplemented with cOmplete™, Mini Protease Inhibitor Cocktail (Roche). Protein extracts were pre-cleared (4 C at 14,000 G for 15 min). The protein levels were measured by Pierce BCA assay (ThermoFisher, 23227) following manufacturer's protocol (assets.thermofisher.com/TFS-Assets/LSG/manuals/MAN0011430_Pierce_BCA_Protein_Asy_UG.pdf). All samples were diluted with extraction buffer to 0.33 mg/mL or the lowest sample concentration.

[0245] 4-12% Bis-Tris plus gels (Invitrogen #NW04120BOX) were loaded with 10 ug protein extract mixed with loading buffer. Gels were run in MOPS buffer at +4 C and the proteins were transferred to the nitrocellulose (Trans-Blot Transfer Pack, 1704158, Bio-Rad) membrane using transfer set and dry transfer apparatus (high molecular weight settings on Trans-Blot Turbo Transfer System, Bio-Rad). Transfer was checked using Ponceau stain following manufacturer's protocol (Thermos Scientific, J63139), membranes were cut between 50-75 kDA markers and blocked in 5% milk overnight at 4° C.

[0246] Membranes were washed with TBST and incubated with primary antibodies for either AAVR (1:2000; 21016-1-AP, Proteintech) or B-actin detection (1:1000; 13E5, Cell Signaling), for 4 hours at room temperature. Next samples were washed with TBST and incubated with HRP-conjugated secondary antibody (1:200,000; 31460, Thermofisher) for 1 hour at room temperature, washed three times with TBST and visualized with ultra-sensitive enhanced chemiluminescent substrate (SuperSignal™ West Femto Maximum Sensitivity Substrate, 34095, Thermofisher).

[0247] mRNA qPCR: Cells were lysed using lysis buffer from Cells-to-CT 1-step TaqMan Kit (Invitrogen A25603). qPCR was run on Quantstudio 6 flex using mastermix from Cells-to-CT 1-step TaqMan Kit (Invitrogen A25603). 20 ul reactions were conducted in technical triplicates for each RNA sample according to the user manual. 2 ul of lysate was added to each reaction and Taqman probes (human): AAVR: FAM Hs00967343_m1 and Act-B: VIC Hs01060665_g1 were used. Delta Delta Ct analysis was conducted to find fold change in relation to untreated control samples.

### 2. Example 2: In Vitro Proof of Concept Study

[0248] The effects of AAVR knockdown on AAV transduction efficiency were evaluated in vitro. Huh7 cells were preconditioned with siRNA or ASO or left untreated. After 48 hours, cells were infected with AAV9 carrying a pCMV-GFP transgene. Relative transduction efficiency between treated or untreated cells was evaluated by fluorescence microscopy 72 hours after infection.

[0249] Cells were seeded in 96 well plates and transfected with AAVR-targeting siRNA or ASO using RNAiMax Lipofectamine (Invitrogen 13778150) according to manufacturer procedure. The dose for treatment varied between 2.5-250 nM per modality of choice. Media was changed 48 h post dosing and cells were spinfected with AAV9-GFP at 2E3 viral particles per well at 1000×g for 1.5 hours at 4 C. AAV-containing media was removed, cells were washed once with 200 uL/well of room temperature media to remove unbound virus. 150 uL/well of fresh media was added and cells were placed back to incubator and grown further at 37° C. with 5% CO2. The next day media was changed and cells were imaged 72 h post infection using wide field and FITC settings at 4×, 10× 40× magnification.

[0250] As shown in FIGS. 5A-B and 6A-B, AAVR-targeting ASO preconditioning reduced AAV9-delievered pCMV-GFP transgene expression in Huh7 cells (FIGS. 5B and 6B).

### 3. Example 3: Study of the Effect of Liver Targeted Anti-AAVR siRNA on AAV Biodistribution in Mice

[0251] To evaluate the effects of anti-AAVR siRNA administration on AAV infectivity in a mouse model, wild-type mice will be pre-conditioned with either a siRNA targeting AAVR (anti-AAVR siRNA) or a control non-targeting siRNA formulated as liver-targeted LNP or directly conjugated to a liver targeting moiety, like GalNAc. After sufficient time has passed to achieve AAVR knockdown, AAV9 encoding green fluorescent protein (GFP) driven by a ubiquitous promoter (CMV or similar) will be administered systemically.

[0252] After allowing time for robust GFP expression, mice will be sacrificed, and a panel of tissues will be harvested for DNA extraction and histology analysis to characterize AAV biodistribution and quantify vector genomes (VG) per cell in those tissues. GFP expression and vector genome quantification in the liver as compared to various muscle and CNS tissues and other organs will be assessed. The timing and dose of siRNA and AAV administration will be guided by pilot dose-ranging studies.

[0253] Tissues from anti-AAVR and control siRNA treated mice will be compared for GFP distribution as well as vector genome number per cell.

### 4. Example 4: In Vivo Dose Range Study

[0254] An in vivo dose range study was conducted to evaluate efficacy of ASOVT002 (ASO) in 6-8 weeks old Wildtype (WT) mice for dose selection.

[0255] A single dose of ASOVT002 was administrated via intraperitoneal injection at the dose of 2, 7, and 20 mg/kg, and the mice were euthanized 7-day post injection for sample analysis. The level of AAV receptor (AAVR) protein in liver was assessed to determine initial ASO dosing.

[0256] Protein extraction (liver): The pre-portioned frozen tissues were transferred to BeadRupture tubes with ceramic beads (19-040E, BeadRupture Elite, Omni International) and submerged in RIPA buffer (ThermoFisher Scientific, 89901) or 10% SDS extraction buffer (1 mM EDTA pH8, 100 mM NaCl, 62.5 mM Tris pH 6.5, 10% SDS, 10% Glycerol, and water) supplemented with HALT Protease Inhibitor, 200 uL for 10-20 mg of frozen sample; and immediately placed into BeadRuptor homogenizer arms and homogenized for 20 s at 6 m/s, for 3 cycles (total). Lysates were spun down for 5 min at 13,000 RCF and supernatant was transferred to fresh tubes and spun down again for 15 min at 15,000 RCF to remove leftover impurities. Protein concentration was checked with Pierce BCA assay (ThermoFisher Scientific, 23227) following manufacturer's protocol and diluted to 5 mg/mL each. Samples were prepared for Jess Abby & Wes Separation module (“Jess”), following manufacturer's protocol from the SM-W004-1 kit. Primary antibody (ab105385, Abcam) was used for AAVR detection at 1:300 dilution and housekeeping gene (GAPDH, PA1987 or FASN, 3180S, from Fisher Scientific) detection at 1:100 dilution; a matching secondary antibody from manufacturer was used. Samples were run using 24-well cartridges using kits for Jess. The data were acquired using the capillary gel electrophoresis system ProteinSimple “Jess” and analyzed using Compass for Simple Western software.

[0257] As shown in FIG. 7, AAV receptor protein was quantified 7 days after dosing with AAVR-targeting ASO at 2, 7 or 20 mg/kg doses, 20 mg/kg of control ASO, or PBS. The 20 mg dose of ASO VT002 induced about 50% knockdown of AAVR protein 7 days post treatment.

[0258] Protein extraction (heart and muscle): The pre-portioned frozen tissues were transferred to BeadRupture tubes with ceramic beads (19-040E, BeadRupture Elite, Omni International) and submerged in 10% SDS extraction buffer (1 mM EDTA pH8, 100 mM NaCl, 62.5 mM Tris pH 6.5, 10% SDS, 10% Glycerol, and water) supplemented with HALT Protease Inhibitor, 200 uL for 10-20 mg of frozen sample; and immediately placed into BeadRuptor homogenizer arms and homogenized for 20 s at 6 m/s, for 3 cycles (total). Lysates were spun down for 5 min at 13,000 RCF and supernatant was transferred to fresh tubes and spiun down again for 15 min at 15,000 RCF to remove leftover impurities. Protein concentration was checked with Pierce BCA assay (ThermoFisher Scientific, 23227) following manufacturer's protocol and diluted to 5 mg/mL each. Samples were prepared for Jess Abby & Wes Separation module (“Jess”), following manufacturer's protocol from SM-W004-1 kit. Primary antibody (ab105385, Abcam) was used for AAVR detection at 1:300 dilution and housekeeping gene (GAPDH, PA1987 Fisher Scientific) detection at 1:50 dilution; a matching secondary antibody from manufacturer was used. Samples were run using 24-well cartridges using kits for Jess. The data were acquired using the capillary gel electrophoresis system ProteinSimple “Jess” and analyzed using Compass for Simple Western software.

[0259] As shown in FIG. 8, AAV receptor protein was quantified 7 days after dosing with AAVR-targeting ASO at 20 mg/kg dose or PBS (control) treated animal. AAVR-targeting ASO treatment did not influence AAVR protein expression in heart and muscle tissues.

### 5. Example 5: In Vivo Kinetic Study

[0260] An in vivo study was conducted to determine AAVR protein knockdown kinetics. The kinetics of ASOVT002 was evaluated in 6-8 weeks old Wildtype (WT) mice for timepoint selection. A single dose of ASOVT002 was administrated via intraperitoneal injection at a dose of 20 mg/kg, and the mice were euthanized at 3-, 7-, or 10-day post injection for sample analysis. The level of AAV receptor (AAVR) protein in liver at different timepoints was assessed via the capillary gel electrophoresis system Jess.

[0261] Protein extraction (liver): The pre-portioned frozen tissues were transferred to BeadRupture tubes with ceramic beads (19-040E, BeadRupture Elite, Omni International) and submerged in 10% SDS extraction buffer (1 mM EDTA pH8, 100 mM NaCl, 62.5 mM Tris pH 6.5, 10% SDS, 10% Glycerol, and water) supplemented with HALT Protease Inhibitor, 200 uL for 10-20 mg of frozen sample; and immediately placed into BeadRuptor homogenizer arms and homogenized for 20 s at 6 m/s, for 3 cycles (total). Lysates were spun down for 5 min at 13,000 RCF. The supernatant was transferred to a fresh tube and spun down again for 15 min at 15,000 RCF to remove leftover impurities. Next, protein concentration was checked with Pierce BCA assay (ThermoFisher Scientific, 23227) according to the manufacturer's protocol and diluted to 5 mg/mL each. Next, samples were prepared for Jess Abby & Wes Separation module (“Jess”), according to manufacturer protocol from SM-W004-1 kit. Primary antibody (ab105385, Abcam) was used for AAVR detection at 1:300 dilution and housekeeping gene (FASN, 3180S, from Fisher Scientific) detection at 1:50 dilution; with a matching secondary antibody from manufacturer. Samples were run using 24-well cartridges using kits for Jess. The data were acquired using the capillary gel electrophoresis system ProteinSimple “Jess” and analyzed using Compass for Simple Western software. As shown in FIG. 9, AAV receptor protein was quantified after 3, 7, and 10 days post-dosing with AAVR ASO at 20 mg/kg or PBS (control) treatment.

### 6. Example 6: Week-Long Conditioning Study

[0262] This study was designed to evaluate the AAV9-CMV-EGFP expression after the knockdown of AAVR in liver by ASO. At day 0, the ASOVT002 was intraperitoneally injected to 6-8 week-old wildtype (WT) mice at a dose of 20 mg/kg, followed by an intravenous injection of AAV9-CMV-EGFP, at the dose of 2×10¹² (vg/kg) at day 3 and euthanasia at day 10 of the study (7-days post AAV9-CMV-EGFP dosing). Tissues were collected for RNA and DNA. AAV9-CMV-EGFP vector genome and transgene expression was assessed by qPCR and qRT-PCR, where AAVR protein and mRNA expression in liver, skeletal muscle and heart was assessed by Jess and qRT-PCR, respectively.

TABLE 3
Additional siRNA Sequences

| SEQ ID | siRNA sequence antisense_ | SEQ ID | siRNA sequence antisense_ |
|---|---|---|---|
| NO | 5′ to 3′_rna | NO | 5′ to 3′ rna |
| 4300 | CAGUUAAAUACCAUGUUUAAU | 6904 | UUAGCAUUCUCGAGCUGCACC |
| 4301 | AGUUAAAUACCAUGUUUAAUC | 6905 | UAGCAUUCUCGAGCUGCACCC |
| 4302 | GUUAAAUACCAUGUUUAAUCA | 6906 | AGCAUUCUCGAGCUGCACCCC |
| 4303 | UUAAAUACCAUGUUUAAUCAU | 6907 | GCAUUCUCGAGCUGCACCCCA |
| 4304 | UAAAUACCAUGUUUAAUCAUC | 6908 | CAUUCUCGAGCUGCACCCCAU |
| 4305 | AAAUACCAUGUUUAAUCAUCC | 6909 | AUUCUCGAGCUGCACCCCAUC |
| 4306 | AAUACCAUGUUUAAUCAUCCC | 6910 | UUCUCGAGCUGCACCCCAUCA |
| 4307 | AUACCAUGUUUAAUCAUCCCA | 6911 | UCUCGAGCUGCACCCCAUCAG |
| 4308 | UACCAUGUUUAAUCAUCCCAC | 6912 | CUCGAGCUGCACCCCAUCAGG |
| 4309 | ACCAUGUUUAAUCAUCCCACA | 6913 | UCGAGCUGCACCCCAUCAGGU |
| 4310 | CCAUGUUUAAUCAUCCCACAA | 6914 | CGAGCUGCACCCCAUCAGGUC |
| 4311 | CAUGUUUAAUCAUCCCACAAU | 6915 | GAGCUGCACCCCAUCAGGUCC |
| 4312 | AUGUUUAAUCAUCCCACAAUG | 6916 | AGCUGCACCCCAUCAGGUCCC |
| 4313 | UGUUUAAUCAUCCCACAAUGG | 6917 | GCUGCACCCCAUCAGGUCCCU |
| 4314 | GUUUAAUCAUCCCACAAUGGA | 6918 | CUGCACCCCAUCAGGUCCCUG |
| 4315 | UUUAAUCAUCCCACAAUGGAC | 6919 | UGCACCCCAUCAGGUCCCUGU |
| 4316 | UUAAUCAUCCCACAAUGGACA | 6920 | GCACCCCAUCAGGUCCCUGUG |
| 4317 | UAAUCAUCCCACAAUGGACAG | 6921 | CACCCCAUCAGGUCCCUGUGU |
| 4318 | AAUCAUCCCACAAUGGACAGU | 6922 | ACCCCAUCAGGUCCCUGUGUU |
| 4319 | AUCAUCCCACAAUGGACAGUA | 6923 | CCCCAUCAGGUCCCUGUGUUU |
| 4320 | UCAUCCCACAAUGGACAGUAG | 6924 | CCCAUCAGGUCCCUGUGUUUU |
| 4321 | CAUCCCACAAUGGACAGUAGU | 6925 | CCAUCAGGUCCCUGUGUUUUU |
| 4322 | AUCCCACAAUGGACAGUAGUG | 6926 | CAUCAGGUCCCUGUGUUUUUU |
| 4323 | UCCCACAAUGGACAGUAGUGC | 6927 | AUCAGGUCCCUGUGUUUUUUC |
| 4324 | CCCACAAUGGACAGUAGUGCA | 6928 | UCAGGUCCCUGUGUUUUUUCC |
| 4325 | CCACAAUGGACAGUAGUGCAG | 6929 | CAGGUCCCUGUGUUUUUUCCC |
| 4326 | CACAAUGGACAGUAGUGCAGU | 6930 | AGGUCCCUGUGUUUUUUCCCA |
| 4327 | ACAAUGGACAGUAGUGCAGUA | 6931 | GGUCCCUGUGUUUUUUCCCAG |
| 4328 | CAAUGGACAGUAGUGCAGUAG | 6932 | GUCCCUGUGUUUUUUCCCAGA |
| 4329 | AAUGGACAGUAGUGCAGUAGU | 6933 | UCCCUGUGUUUUUUCCCAGAG |
| 4330 | AUGGACAGUAGUGCAGUAGUA | 6934 | CCCUGUGUUUUUUCCCAGAGA |
| 4331 | UGGACAGUAGUGCAGUAGUAG | 6935 | CCUGUGUUUUUUCCCAGAGAU |
| 4332 | GGACAGUAGUGCAGUAGUAGA | 6936 | CUGUGUUUUUUCCCAGAGAUA |
| 4333 | GACAGUAGUGCAGUAGUAGAA | 6937 | UGUGUUUUUUCCCAGAGAUAU |
| 4334 | ACAGUAGUGCAGUAGUAGAAA | 6938 | GUGUUUUUUCCCAGAGAUAUG |
| 4335 | CAGUAGUGCAGUAGUAGAAAU | 6939 | UGUUUUUUCCCAGAGAUAUGA |
| 4336 | AGUAGUGCAGUAGUAGAAAUU | 6940 | GUUUUUUCCCAGAGAUAUGAG |
| 4337 | GUAGUGCAGUAGUAGAAAUUA | 6941 | UUUUUUCCCAGAGAUAUGAGA |
| 4338 | UAGUGCAGUAGUAGAAAUUAU | 6942 | UUUUUCCCAGAGAUAUGAGAU |
| 4339 | AGUGCAGUAGUAGAAAUUAUA | 6943 | UUUUCCCAGAGAUAUGAGAUA |
| 4340 | GUGCAGUAGUAGAAAUUAUAA | 6944 | UUUCCCAGAGAUAUGAGAUAA |
| 4341 | UGCAGUAGUAGAAAUUAUAAG | 6945 | UUCCCAGAGAUAUGAGAUAAU |
| 4342 | GCAGUAGUAGAAAUUAUAAGU | 6946 | UCCCAGAGAUAUGAGAUAAUU |
| 4343 | CAGUAGUAGAAAUUAUAAGUG | 6947 | CCCAGAGAUAUGAGAUAAUUU |
| 4344 | AGUAGUAGAAAUUAUAAGUGU | 6948 | CCAGAGAUAUGAGAUAAUUUU |
| 4345 | GUAGUAGAAAUUAUAAGUGUC | 6949 | CAGAGAUAUGAGAUAAUUUUC |
| 4346 | UAGUAGAAAUUAUAAGUGUCU | 6950 | AGAGAUAUGAGAUAAUUUUCU |
| 4347 | AGUAGAAAUUAUAAGUGUCUC | 6951 | GAGAUAUGAGAUAAUUUUCUG |
| 4348 | GUAGAAAUUAUAAGUGUCUCU | 6952 | AGAUAUGAGAUAAUUUUCUGA |
| 4349 | UAGAAAUUAUAAGUGUCUCUU | 6953 | GAUAUGAGAUAAUUUUCUGAU |
| 4350 | AGAAAUUAUAAGUGUCUCUUU | 6954 | AUAUGAGAUAAUUUUCUGAUC |
| 4351 | GAAAUUAUAAGUGUCUCUUUA | 6955 | UAUGAGAUAAUUUUCUGAUCA |
| 4352 | AAAUUAUAAGUGUCUCUUUAA | 6956 | AUGAGAUAAUUUUCUGAUCAU |
| 4353 | AAUUAUAAGUGUCUCUUUAAA | 6957 | UGAGAUAAUUUUCUGAUCAUC |
| 4354 | AUUAUAAGUGUCUCUUUAAAA | 6958 | GAGAUAAUUUUCUGAUCAUCU |
| 4355 | UUAUAAGUGUCUCUUUAAAAA | 6959 | AGAUAAUUUUCUGAUCAUCUG |
| 4356 | UAUAAGUGUCUCUUUAAAAAG | 6960 | GAUAAUUUUCUGAUCAUCUGA |
| 4357 | AUAAGUGUCUCUUUAAAAAGU | 6961 | AUAAUUUUCUGAUCAUCUGAG |
| 4358 | UAAGUGUCUCUUUAAAAAGUC | 6962 | UAAUUUUCUGAUCAUCUGAGC |
| 4359 | AAGUGUCUCUUUAAAAAGUCA | 6963 | AAUUUUCUGAUCAUCUGAGCU |
| 4360 | AGUGUCUCUUUAAAAAGUCAC | 6964 | AUUUUCUGAUCAUCUGAGCUC |
| 4361 | GUGUCUCUUUAAAAAGUCACU | 6965 | UUUUCUGAUCAUCUGAGCUCU |
| 4362 | UGUCUCUUUAAAAAGUCACUC | 6966 | UUUCUGAUCAUCUGAGCUCUU |
| 4363 | GUCUCUUUAAAAAGUCACUCC | 6967 | UUCUGAUCAUCUGAGCUCUUG |
| 4364 | UCUCUUUAAAAAGUCACUCCC | 6968 | UCUGAUCAUCUGAGCUCUUGC |
| 4365 | CUCUUUAAAAAGUCACUCCCC | 6969 | CUGAUCAUCUGAGCUCUUGCU |
| 4366 | UCUUUAAAAAGUCACUCCCCC | 6970 | UGAUCAUCUGAGCUCUUGCUG |
| 4367 | CUUUAAAAAGUCACUCCCCCA | 6971 | GAUCAUCUGAGCUCUUGCUGC |
| 4368 | UUUAAAAAGUCACUCCCCCAA | 6972 | AUCAUCUGAGCUCUUGCUGCC |
| 4369 | UUAAAAAGUCACUCCCCCAAA | 6973 | UCAUCUGAGCUCUUGCUGCCA |
| 4370 | UAAAAAGUCACUCCCCCAAAG | 6974 | CAUCUGAGCUCUUGCUGCCAU |
| 4371 | AAAAAGUCACUCCCCCAAAGU | 6975 | AUCUGAGCUCUUGCUGCCAUC |
| 4372 | AAAAGUCACUCCCCCAAAGUU | 6976 | UCUGAGCUCUUGCUGCCAUCC |
| 4373 | AAAGUCACUCCCCCAAAGUUU | 6977 | CUGAGCUCUUGCUGCCAUCCA |
| 4374 | AAGUCACUCCCCCAAAGUUUC | 6978 | UGAGCUCUUGCUGCCAUCCAG |
| 4375 | AGUCACUCCCCCAAAGUUUCC | 6979 | GAGCUCUUGCUGCCAUCCAGG |
| 4376 | GUCACUCCCCCAAAGUUUCCA | 6980 | AGCUCUUGCUGCCAUCCAGGG |
| 4377 | UCACUCCCCCAAAGUUUCCAU | 6981 | GCUCUUGCUGCCAUCCAGGGU |
| 4378 | CACUCCCCCAAAGUUUCCAUU | 6982 | CUCUUGCUGCCAUCCAGGGUU |
| 4379 | ACUCCCCCAAAGUUUCCAUUC | 6983 | UCUUGCUGCCAUCCAGGGUUG |
| 4380 | CUCCCCCAAAGUUUCCAUUCC | 6984 | CUUGCUGCCAUCCAGGGUUGU |
| 4381 | UCCCCCAAAGUUUCCAUUCCC | 6985 | UUGCUGCCAUCCAGGGUUGUG |
| 4382 | CCCCCAAAGUUUCCAUUCCCC | 6986 | UGCUGCCAUCCAGGGUUGUGC |
| 4383 | CCCCAAAGUUUCCAUUCCCCA | 6987 | GCUGCCAUCCAGGGUUGUGCU |
| 4384 | CCCAAAGUUUCCAUUCCCCAA | 6988 | CUGCCAUCCAGGGUUGUGCUA |
| 4385 | CCAAAGUUUCCAUUCCCCAAU | 6989 | UGCCAUCCAGGGUUGUGCUAU |
| 4386 | CAAAGUUUCCAUUCCCCAAUA | 6990 | GCCAUCCAGGGUUGUGCUAUC |
| 4387 | AAAGUUUCCAUUCCCCAAUAC | 6991 | CCAUCCAGGGUUGUGCUAUCC |
| 4388 | AAGUUUCCAUUCCCCAAUACC | 6992 | CAUCCAGGGUUGUGCUAUCCA |
| 4389 | AGUUUCCAUUCCCCAAUACCC | 6993 | AUCCAGGGUUGUGCUAUCCAC |
| 4390 | GUUUCCAUUCCCCAAUACCCA | 6994 | UCCAGGGUUGUGCUAUCCACA |
| 4391 | UUUCCAUUCCCCAAUACCCAG | 6995 | CCAGGGUUGUGCUAUCCACAG |
| 4392 | UUCCAUUCCCCAAUACCCAGA | 6996 | CAGGGUUGUGCUAUCCACAGG |
| 4393 | UCCAUUCCCCAAUACCCAGAU | 6997 | AGGGUUGUGCUAUCCACAGGA |
| 4394 | CCAUUCCCCAAUACCCAGAUA | 6998 | GGGUUGUGCUAUCCACAGGAA |
| 4395 | CAUUCCCCAAUACCCAGAUAA | 6999 | GGUUGUGCUAUCCACAGGAAG |
| 4396 | AUUCCCCAAUACCCAGAUAAC | 7000 | GUUGUGCUAUCCACAGGAAGG |
| 4397 | UUCCCCAAUACCCAGAUAACC | 7001 | UUGUGCUAUCCACAGGAAGGG |
| 4398 | UCCCCAAUACCCAGAUAACCA | 7002 | UGUGCUAUCCACAGGAAGGGU |
| 4399 | CCCCAAUACCCAGAUAACCAU | 7003 | GUGCUAUCCACAGGAAGGGUC |
| 4400 | CCCAAUACCCAGAUAACCAUG | 7004 | UGCUAUCCACAGGAAGGGUCA |
| 4401 | CCAAUACCCAGAUAACCAUGG | 7005 | GCUAUCCACAGGAAGGGUCAG |
| 4402 | CAAUACCCAGAUAACCAUGGU | 7006 | CUAUCCACAGGAAGGGUCAGC |
| 4403 | AAUACCCAGAUAACCAUGGUG | 7007 | UAUCCACAGGAAGGGUCAGCU |
| 4404 | AUACCCAGAUAACCAUGGUGG | 7008 | AUCCACAGGAAGGGUCAGCUC |
| 4405 | UACCCAGAUAACCAUGGUGGA | 7009 | UCCACAGGAAGGGUCAGCUCU |
| 4406 | ACCCAGAUAACCAUGGUGGAA | 7010 | CCACAGGAAGGGUCAGCUCUU |
| 4407 | CCCAGAUAACCAUGGUGGAAC | 7011 | CACAGGAAGGGUCAGCUCUUU |
| 4408 | CCAGAUAACCAUGGUGGAACA | 7012 | ACAGGAAGGGUCAGCUCUUUA |
| 4409 | CAGAUAACCAUGGUGGAACAG | 7013 | CAGGAAGGGUCAGCUCUUUAU |
| 4410 | AGAUAACCAUGGUGGAACAGG | 7014 | AGGAAGGGUCAGCUCUUUAUC |
| 4411 | GAUAACCAUGGUGGAACAGGG | 7015 | GGAAGGGUCAGCUCUUUAUCU |
| 4412 | AUAACCAUGGUGGAACAGGGC | 7016 | GAAGGGUCAGCUCUUUAUCUG |
| 4413 | UAACCAUGGUGGAACAGGGCC | 7017 | AAGGGUCAGCUCUUUAUCUGG |
| 4414 | AACCAUGGUGGAACAGGGCCA | 7018 | AGGGUCAGCUCUUUAUCUGGG |
| 4415 | ACCAUGGUGGAACAGGGCCAG | 7019 | GGGUCAGCUCUUUAUCUGGGC |
| 4416 | CCAUGGUGGAACAGGGCCAGG | 7020 | GGUCAGCUCUUUAUCUGGGCC |
| 4417 | CAUGGUGGAACAGGGCCAGGG | 7021 | GUCAGCUCUUUAUCUGGGCCU |
| 4418 | AUGGUGGAACAGGGCCAGGGU | 7022 | UCAGCUCUUUAUCUGGGCCUG |
| 4419 | UGGUGGAACAGGGCCAGGGUG | 7023 | CAGCUCUUUAUCUGGGCCUGC |
| 4420 | GGUGGAACAGGGCCAGGGUGA | 7024 | AGCUCUUUAUCUGGGCCUGCA |
| 4421 | GUGGAACAGGGCCAGGGUGAG | 7025 | GCUCUUUAUCUGGGCCUGCAU |
| 4422 | UGGAACAGGGCCAGGGUGAGG | 7026 | CUCUUUAUCUGGGCCUGCAUC |
| 4423 | GGAACAGGGCCAGGGUGAGGG | 7027 | UCUUUAUCUGGGCCUGCAUCU |
| 4424 | GAACAGGGCCAGGGUGAGGGG | 7028 | CUUUAUCUGGGCCUGCAUCUG |
| 4425 | AACAGGGCCAGGGUGAGGGGG | 7029 | UUUAUCUGGGCCUGCAUCUGC |
| 4426 | ACAGGGCCAGGGUGAGGGGGA | 7030 | UUAUCUGGGCCUGCAUCUGCC |
| 4427 | CAGGGCCAGGGUGAGGGGGAC | 7031 | UAUCUGGGCCUGCAUCUGCCU |
| 4428 | AGGGCCAGGGUGAGGGGGACU | 7032 | AUCUGGGCCUGCAUCUGCCUG |
| 4429 | GGGCCAGGGUGAGGGGGACUC | 7033 | UCUGGGCCUGCAUCUGCCUGA |
| 4430 | GGCCAGGGUGAGGGGGACUCA | 7034 | CUGGGCCUGCAUCUGCCUGAG |
| 4431 | GCCAGGGUGAGGGGGACUCAG | 7035 | UGGGCCUGCAUCUGCCUGAGG |
| 4432 | CCAGGGUGAGGGGGACUCAGG | 7036 | GGGCCUGCAUCUGCCUGAGGA |
| 4433 | CAGGGUGAGGGGGACUCAGGA | 7037 | GGCCUGCAUCUGCCUGAGGAG |
| 4434 | AGGGUGAGGGGGACUCAGGAA | 7038 | GCCUGCAUCUGCCUGAGGAGG |
| 4435 | GGGUGAGGGGGACUCAGGAAG | 7039 | CCUGCAUCUGCCUGAGGAGGC |
| 4436 | GGUGAGGGGGACUCAGGAAGU | 7040 | CUGCAUCUGCCUGAGGAGGCU |
| 4437 | GUGAGGGGGACUCAGGAAGUC | 7041 | UGCAUCUGCCUGAGGAGGCUU |
| 4438 | UGAGGGGGACUCAGGAAGUCU | 7042 | GCAUCUGCCUGAGGAGGCUUA |
| 4439 | GAGGGGGACUCAGGAAGUCUU | 7043 | CAUCUGCCUGAGGAGGCUUAU |
| 4440 | AGGGGGACUCAGGAAGUCUUG | 7044 | AUCUGCCUGAGGAGGCUUAUU |
| 4441 | GGGGGACUCAGGAAGUCUUGG | 7045 | UCUGCCUGAGGAGGCUUAUUG |
| 4442 | GGGGACUCAGGAAGUCUUGGU | 7046 | CUGCCUGAGGAGGCUUAUUGU |
| 4443 | GGGACUCAGGAAGUCUUGGUU | 7047 | UGCCUGAGGAGGCUUAUUGUU |
| 4444 | GGACUCAGGAAGUCUUGGUUC | 7048 | GCCUGAGGAGGCUUAUUGUUU |
| 4445 | GACUCAGGAAGUCUUGGUUCC | 7049 | CCUGAGGAGGCUUAUUGUUUU |
| 4446 | ACUCAGGAAGUCUUGGUUCCA | 7050 | CUGAGGAGGCUUAUUGUUUUC |
| 4447 | CUCAGGAAGUCUUGGUUCCAA | 7051 | UGAGGAGGCUUAUUGUUUUCA |
| 4448 | UCAGGAAGUCUUGGUUCCAAG | 7052 | GAGGAGGCUUAUUGUUUUCAG |
| 4449 | CAGGAAGUCUUGGUUCCAAGG | 7053 | AGGAGGCUUAUUGUUUUCAGG |
| 4450 | AGGAAGUCUUGGUUCCAAGGA | 7054 | GGAGGCUUAUUGUUUUCAGGU |
| 4451 | GGAAGUCUUGGUUCCAAGGAG | 7055 | GAGGCUUAUUGUUUUCAGGUU |
| 4452 | GAAGUCUUGGUUCCAAGGAGA | 7056 | AGGCUUAUUGUUUUCAGGUUG |
| 4453 | AAGUCUUGGUUCCAAGGAGAU | 7057 | GGCUUAUUGUUUUCAGGUUGC |
| 4454 | AGUCUUGGUUCCAAGGAGAUG | 7058 | GCUUAUUGUUUUCAGGUUGCA |
| 4455 | GUCUUGGUUCCAAGGAGAUGA | 7059 | CUUAUUGUUUUCAGGUUGCAC |
| 4456 | UCUUGGUUCCAAGGAGAUGAA | 7060 | UUAUUGUUUUCAGGUUGCACA |
| 4457 | CUUGGUUCCAAGGAGAUGAAA | 7061 | UAUUGUUUUCAGGUUGCACAA |
| 4458 | UUGGUUCCAAGGAGAUGAAAG | 7062 | AUUGUUUUCAGGUUGCACAAU |
| 4459 | UGGUUCCAAGGAGAUGAAAGU | 7063 | UUGUUUUCAGGUUGCACAAUA |
| 4460 | GGUUCCAAGGAGAUGAAAGUC | 7064 | UGUUUUCAGGUUGCACAAUAA |
| 4461 | GUUCCAAGGAGAUGAAAGUCU | 7065 | GUUUUCAGGUUGCACAAUAAC |
| 4462 | UUCCAAGGAGAUGAAAGUCUU | 7066 | UUUUCAGGUUGCACAAUAACA |
| 4463 | UCCAAGGAGAUGAAAGUCUUU | 7067 | UUUCAGGUUGCACAAUAACAG |
| 4464 | CCAAGGAGAUGAAAGUCUUUC | 7068 | UUCAGGUUGCACAAUAACAGU |
| 4465 | CAAGGAGAUGAAAGUCUUUCC | 7069 | UCAGGUUGCACAAUAACAGUC |
| 4466 | AAGGAGAUGAAAGUCUUUCCA | 7070 | CAGGUUGCACAAUAACAGUCA |
| 4467 | AGGAGAUGAAAGUCUUUCCAA | 7071 | AGGUUGCACAAUAACAGUCAC |
| 4468 | GGAGAUGAAAGUCUUUCCAAG | 7072 | GGUUGCACAAUAACAGUCACU |
| 4469 | GAGAUGAAAGUCUUUCCAAGU | 7073 | GUUGCACAAUAACAGUCACUU |
| 4470 | AGAUGAAAGUCUUUCCAAGUC | 7074 | UUGCACAAUAACAGUCACUUG |
| 4471 | GAUGAAAGUCUUUCCAAGUCA | 7075 | UGCACAAUAACAGUCACUUGA |
| 4472 | AUGAAAGUCUUUCCAAGUCAA | 7076 | GCACAAUAACAGUCACUUGAG |
| 4473 | UGAAAGUCUUUCCAAGUCAAA | 7077 | CACAAUAACAGUCACUUGAGC |
| 4474 | GAAAGUCUUUCCAAGUCAAAU | 7078 | ACAAUAACAGUCACUUGAGCA |
| 4475 | AAAGUCUUUCCAAGUCAAAUU | 7079 | CAAUAACAGUCACUUGAGCAG |
| 4476 | AAGUCUUUCCAAGUCAAAUUU | 7080 | AAUAACAGUCACUUGAGCAGU |
| 4477 | AGUCUUUCCAAGUCAAAUUUG | 7081 | AUAACAGUCACUUGAGCAGUG |
| 4478 | GUCUUUCCAAGUCAAAUUUGC | 7082 | UAACAGUCACUUGAGCAGUGG |
| 4479 | UCUUUCCAAGUCAAAUUUGCC | 7083 | AACAGUCACUUGAGCAGUGGC |
| 4480 | CUUUCCAAGUCAAAUUUGCCU | 7084 | ACAGUCACUUGAGCAGUGGCC |
| 4481 | UUUCCAAGUCAAAUUUGCCUU | 7085 | CAGUCACUUGAGCAGUGGCCU |
| 4482 | UUCCAAGUCAAAUUUGCCUUG | 7086 | AGUCACUUGAGCAGUGGCCUG |
| 4483 | UCCAAGUCAAAUUUGCCUUGU | 7087 | GUCACUUGAGCAGUGGCCUGC |
| 4484 | CCAAGUCAAAUUUGCCUUGUG | 7088 | UCACUUGAGCAGUGGCCUGCU |
| 4485 | CAAGUCAAAUUUGCCUUGUGA | 7089 | CACUUGAGCAGUGGCCUGCUG |
| 4486 | AAGUCAAAUUUGCCUUGUGAG | 7090 | ACUUGAGCAGUGGCCUGCUGU |
| 4487 | AGUCAAAUUUGCCUUGUGAGC | 7091 | CUUGAGCAGUGGCCUGCUGUC |
| 4488 | GUCAAAUUUGCCUUGUGAGCA | 7092 | UUGAGCAGUGGCCUGCUGUCC |
| 4489 | UCAAAUUUGCCUUGUGAGCAG | 7093 | UGAGCAGUGGCCUGCUGUCCU |
| 4490 | CAAAUUUGCCUUGUGAGCAGC | 7094 | GAGCAGUGGCCUGCUGUCCUA |
| 4491 | AAAUUUGCCUUGUGAGCAGCC | 7095 | AGCAGUGGCCUGCUGUCCUAU |
| 4492 | AAUUUGCCUUGUGAGCAGCCA | 7096 | GCAGUGGCCUGCUGUCCUAUU |
| 4493 | AUUUGCCUUGUGAGCAGCCAA | 7097 | CAGUGGCCUGCUGUCCUAUUG |
| 4494 | UUUGCCUUGUGAGCAGCCAAG | 7098 | AGUGGCCUGCUGUCCUAUUGU |
| 4495 | UUGCCUUGUGAGCAGCCAAGA | 7099 | GUGGCCUGCUGUCCUAUUGUG |
| 4496 | UGCCUUGUGAGCAGCCAAGAG | 7100 | UGGCCUGCUGUCCUAUUGUGU |
| 4497 | GCCUUGUGAGCAGCCAAGAGC | 7101 | GGCCUGCUGUCCUAUUGUGUC |
| 4498 | CCUUGUGAGCAGCCAAGAGCC | 7102 | GCCUGCUGUCCUAUUGUGUCA |
| 4499 | CUUGUGAGCAGCCAAGAGCCC | 7103 | CCUGCUGUCCUAUUGUGUCAG |
| 4500 | UUGUGAGCAGCCAAGAGCCCA | 7104 | CUGCUGUCCUAUUGUGUCAGU |
| 4501 | UGUGAGCAGCCAAGAGCCCAA | 7105 | UGCUGUCCUAUUGUGUCAGUC |
| 4502 | GUGAGCAGCCAAGAGCCCAAU | 7106 | GCUGUCCUAUUGUGUCAGUCA |
| 4503 | UGAGCAGCCAAGAGCCCAAUG | 7107 | CUGUCCUAUUGUGUCAGUCAC |
| 4504 | GAGCAGCCAAGAGCCCAAUGA | 7108 | UGUCCUAUUGUGUCAGUCACU |
| 4505 | AGCAGCCAAGAGCCCAAUGAG | 7109 | GUCCUAUUGUGUCAGUCACUG |
| 4506 | GCAGCCAAGAGCCCAAUGAGU | 7110 | UCCUAUUGUGUCAGUCACUGU |
| 4507 | CAGCCAAGAGCCCAAUGAGUU | 7111 | CCUAUUGUGUCAGUCACUGUG |
| 4508 | AGCCAAGAGCCCAAUGAGUUG | 7112 | CUAUUGUGUCAGUCACUGUGA |
| 4509 | GCCAAGAGCCCAAUGAGUUGA | 7113 | UAUUGUGUCAGUCACUGUGAG |
| 4510 | CCAAGAGCCCAAUGAGUUGAU | 7114 | AUUGUGUCAGUCACUGUGAGC |
| 4511 | CAAGAGCCCAAUGAGUUGAUG | 7115 | UUGUGUCAGUCACUGUGAGCU |
| 4512 | AAGAGCCCAAUGAGUUGAUGC | 7116 | UGUGUCAGUCACUGUGAGCUG |
| 4513 | AGAGCCCAAUGAGUUGAUGCA | 7117 | GUGUCAGUCACUGUGAGCUGG |
| 4514 | GAGCCCAAUGAGUUGAUGCAU | 7118 | UGUCAGUCACUGUGAGCUGGU |
| 4515 | AGCCCAAUGAGUUGAUGCAUA | 7119 | GUCAGUCACUGUGAGCUGGUA |
| 4516 | GCCCAAUGAGUUGAUGCAUAC | 7120 | UCAGUCACUGUGAGCUGGUAA |
| 4517 | CCCAAUGAGUUGAUGCAUACG | 7121 | CAGUCACUGUGAGCUGGUAAG |
| 4518 | CCAAUGAGUUGAUGCAUACGC | 7122 | AGUCACUGUGAGCUGGUAAGU |
| 4519 | CAAUGAGUUGAUGCAUACGCG | 7123 | GUCACUGUGAGCUGGUAAGUG |
| 4520 | AAUGAGUUGAUGCAUACGCGC | 7124 | UCACUGUGAGCUGGUAAGUGU |
| 4521 | AUGAGUUGAUGCAUACGCGCU | 7125 | CACUGUGAGCUGGUAAGUGUA |
| 4522 | UGAGUUGAUGCAUACGCGCUC | 7126 | ACUGUGAGCUGGUAAGUGUAG |
| 4523 | GAGUUGAUGCAUACGCGCUCA | 7127 | CUGUGAGCUGGUAAGUGUAGU |
| 4524 | AGUUGAUGCAUACGCGCUCAC | 7128 | UGUGAGCUGGUAAGUGUAGUC |
| 4525 | GUUGAUGCAUACGCGCUCACU | 7129 | GUGAGCUGGUAAGUGUAGUCU |
| 4526 | UUGAUGCAUACGCGCUCACUC | 7130 | UGAGCUGGUAAGUGUAGUCUC |
| 4527 | UGAUGCAUACGCGCUCACUCU | 7131 | GAGCUGGUAAGUGUAGUCUCC |
| 4528 | GAUGCAUACGCGCUCACUCUA | 7132 | AGCUGGUAAGUGUAGUCUCCU |
| 4529 | AUGCAUACGCGCUCACUCUAA | 7133 | GCUGGUAAGUGUAGUCUCCUU |
| 4530 | UGCAUACGCGCUCACUCUAAC | 7134 | CUGGUAAGUGUAGUCUCCUUC |
| 4531 | GCAUACGCGCUCACUCUAACA | 7135 | UGGUAAGUGUAGUCUCCUUCU |
| 4532 | CAUACGCGCUCACUCUAACAC | 7136 | GGUAAGUGUAGUCUCCUUCUU |
| 4533 | AUACGCGCUCACUCUAACACG | 7137 | GUAAGUGUAGUCUCCUUCUUG |
| 4534 | UACGCGCUCACUCUAACACGC | 7138 | UAAGUGUAGUCUCCUUCUUGC |
| 4535 | ACGCGCUCACUCUAACACGCA | 7139 | AAGUGUAGUCUCCUUCUUGCA |
| 4536 | CGCGCUCACUCUAACACGCAC | 7140 | AGUGUAGUCUCCUUCUUGCAU |
| 4537 | GCGCUCACUCUAACACGCACA | 7141 | GUGUAGUCUCCUUCUUGCAUC |
| 4538 | CGCUCACUCUAACACGCACAC | 7142 | UGUAGUCUCCUUCUUGCAUCG |
| 4539 | GCUCACUCUAACACGCACACA | 7143 | GUAGUCUCCUUCUUGCAUCGC |
| 4540 | CUCACUCUAACACGCACACAU | 7144 | UAGUCUCCUUCUUGCAUCGCA |
| 4541 | UCACUCUAACACGCACACAUG | 7145 | AGUCUCCUUCUUGCAUCGCAG |
| 4542 | CACUCUAACACGCACACAUGC | 7146 | GUCUCCUUCUUGCAUCGCAGA |
| 4543 | ACUCUAACACGCACACAUGCA | 7147 | UCUCCUUCUUGCAUCGCAGAG |
| 4544 | CUCUAACACGCACACAUGCAA | 7148 | CUCCUUCUUGCAUCGCAGAGA |
| 4545 | UCUAACACGCACACAUGCAAG | 7149 | UCCUUCUUGCAUCGCAGAGAG |
| 4546 | CUAACACGCACACAUGCAAGG | 7150 | CCUUCUUGCAUCGCAGAGAGC |
| 4547 | UAACACGCACACAUGCAAGGG | 7151 | CUUCUUGCAUCGCAGAGAGCU |
| 4548 | AACACGCACACAUGCAAGGGA | 7152 | UUCUUGCAUCGCAGAGAGCUG |
| 4549 | ACACGCACACAUGCAAGGGAC | 7153 | UCUUGCAUCGCAGAGAGCUGU |
| 4550 | CACGCACACAUGCAAGGGACA | 7154 | CUUGCAUCGCAGAGAGCUGUA |
| 4551 | ACGCACACAUGCAAGGGACAC | 7155 | UUGCAUCGCAGAGAGCUGUAA |
| 4552 | CGCACACAUGCAAGGGACACA | 7156 | UGCAUCGCAGAGAGCUGUAAG |
| 4553 | GCACACAUGCAAGGGACACAG | 7157 | GCAUCGCAGAGAGCUGUAAGG |
| 4554 | CACACAUGCAAGGGACACAGA | 7158 | CAUCGCAGAGAGCUGUAAGGU |
| 4555 | ACACAUGCAAGGGACACAGAA | 7159 | AUCGCAGAGAGCUGUAAGGUU |
| 4556 | CACAUGCAAGGGACACAGAAC | 7160 | UCGCAGAGAGCUGUAAGGUUG |
| 4557 | ACAUGCAAGGGACACAGAACA | 7161 | CGCAGAGAGCUGUAAGGUUGG |
| 4558 | CAUGCAAGGGACACAGAACAC | 7162 | GCAGAGAGCUGUAAGGUUGGU |
| 4559 | AUGCAAGGGACACAGAACACA | 7163 | CAGAGAGCUGUAAGGUUGGUG |
| 4560 | UGCAAGGGACACAGAACACAU | 7164 | AGAGAGCUGUAAGGUUGGUGU |
| 4561 | GCAAGGGACACAGAACACAUA | 7165 | GAGAGCUGUAAGGUUGGUGUU |
| 4562 | CAAGGGACACAGAACACAUAC | 7166 | AGAGCUGUAAGGUUGGUGUUC |
| 4563 | AAGGGACACAGAACACAUACA | 7167 | GAGCUGUAAGGUUGGUGUUCU |
| 4564 | AGGGACACAGAACACAUACAG | 7168 | AGCUGUAAGGUUGGUGUUCUA |
| 4565 | GGGACACAGAACACAUACAGA | 7169 | GCUGUAAGGUUGGUGUUCUAA |
| 4566 | GGACACAGAACACAUACAGAU | 7170 | CUGUAAGGUUGGUGUUCUAAC |
| 4567 | GACACAGAACACAUACAGAUG | 7171 | UGUAAGGUUGGUGUUCUAACA |
| 4568 | ACACAGAACACAUACAGAUGG | 7172 | GUAAGGUUGGUGUUCUAACAC |
| 4569 | CACAGAACACAUACAGAUGGA | 7173 | UAAGGUUGGUGUUCUAACACC |
| 4570 | ACAGAACACAUACAGAUGGAG | 7174 | AAGGUUGGUGUUCUAACACCC |
| 4571 | CAGAACACAUACAGAUGGAGG | 7175 | AGGUUGGUGUUCUAACACCCU |
| 4572 | AGAACACAUACAGAUGGAGGG | 7176 | GGUUGGUGUUCUAACACCCUG |
| 4573 | GAACACAUACAGAUGGAGGGA | 7177 | GUUGGUGUUCUAACACCCUGC |
| 4574 | AACACAUACAGAUGGAGGGAC | 7178 | UUGGUGUUCUAACACCCUGCA |
| 4575 | ACACAUACAGAUGGAGGGACA | 7179 | UGGUGUUCUAACACCCUGCAU |
| 4576 | CACAUACAGAUGGAGGGACAG | 7180 | GGUGUUCUAACACCCUGCAUC |
| 4577 | ACAUACAGAUGGAGGGACAGA | 7181 | GUGUUCUAACACCCUGCAUCU |
| 4578 | CAUACAGAUGGAGGGACAGAG | 7182 | UGUUCUAACACCCUGCAUCUC |
| 4579 | AUACAGAUGGAGGGACAGAGA | 7183 | GUUCUAACACCCUGCAUCUCC |
| 4580 | UACAGAUGGAGGGACAGAGAG | 7184 | UUCUAACACCCUGCAUCUCCA |
| 4581 | ACAGAUGGAGGGACAGAGAGG | 7185 | UCUAACACCCUGCAUCUCCAC |
| 4582 | CAGAUGGAGGGACAGAGAGGG | 7186 | CUAACACCCUGCAUCUCCACC |
| 4583 | AGAUGGAGGGACAGAGAGGGG | 7187 | UAACACCCUGCAUCUCCACCA |
| 4584 | GAUGGAGGGACAGAGAGGGGA | 7188 | AACACCCUGCAUCUCCACCAC |
| 4585 | AUGGAGGGACAGAGAGGGGAC | 7189 | ACACCCUGCAUCUCCACCACU |
| 4586 | UGGAGGGACAGAGAGGGGACC | 7190 | CACCCUGCAUCUCCACCACUU |
| 4587 | GGAGGGACAGAGAGGGGACCA | 7191 | ACCCUGCAUCUCCACCACUUU |
| 4588 | GAGGGACAGAGAGGGGACCAC | 7192 | CCCUGCAUCUCCACCACUUUC |
| 4589 | AGGGACAGAGAGGGGACCACA | 7193 | CCUGCAUCUCCACCACUUUCC |
| 4590 | GGGACAGAGAGGGGACCACAG | 7194 | CUGCAUCUCCACCACUUUCCC |
| 4591 | GGACAGAGAGGGGACCACAGC | 7195 | UGCAUCUCCACCACUUUCCCU |
| 4592 | GACAGAGAGGGGACCACAGCG | 7196 | GCAUCUCCACCACUUUCCCUU |
| 4593 | ACAGAGAGGGGACCACAGCGG | 7197 | CAUCUCCACCACUUUCCCUUU |
| 4594 | CAGAGAGGGGACCACAGCGGG | 7198 | AUCUCCACCACUUUCCCUUUG |
| 4595 | AGAGAGGGGACCACAGCGGGG | 7199 | UCUCCACCACUUUCCCUUUGC |
| 4596 | GAGAGGGGACCACAGCGGGGC | 7200 | CUCCACCACUUUCCCUUUGCU |
| 4597 | AGAGGGGACCACAGCGGGGCC | 7201 | UCCACCACUUUCCCUUUGCUG |
| 4598 | GAGGGGACCACAGCGGGGCCA | 7202 | CCACCACUUUCCCUUUGCUGC |
| 4599 | AGGGGACCACAGCGGGGCCAU | 7203 | CACCACUUUCCCUUUGCUGCU |
| 4600 | GGGGACCACAGCGGGGCCAUC | 7204 | ACCACUUUCCCUUUGCUGCUU |
| 4601 | GGGACCACAGCGGGGCCAUCG | 7205 | CCACUUUCCCUUUGCUGCUUG |
| 4602 | GGACCACAGCGGGGCCAUCGC | 7206 | CACUUUCCCUUUGCUGCUUGG |
| 4603 | GACCACAGCGGGGCCAUCGCA | 7207 | ACUUUCCCUUUGCUGCUUGGG |
| 4604 | ACCACAGCGGGGCCAUCGCAC | 7208 | CUUUCCCUUUGCUGCUUGGGC |
| 4605 | CCACAGCGGGGCCAUCGCACA | 7209 | UUUCCCUUUGCUGCUUGGGCU |
| 4606 | CACAGCGGGGCCAUCGCACAC | 7210 | UUCCCUUUGCUGCUUGGGCUG |
| 4607 | ACAGCGGGGCCAUCGCACACA | 7211 | UCCCUUUGCUGCUUGGGCUGA |
| 4608 | CAGCGGGGCCAUCGCACACAU | 7212 | CCCUUUGCUGCUUGGGCUGAG |
| 4609 | AGCGGGGCCAUCGCACACAUG | 7213 | CCUUUGCUGCUUGGGCUGAGU |
| 4610 | GCGGGGCCAUCGCACACAUGC | 7214 | CUUUGCUGCUUGGGCUGAGUG |
| 4611 | CGGGGCCAUCGCACACAUGCG | 7215 | UUUGCUGCUUGGGCUGAGUGA |
| 4612 | GGGGCCAUCGCACACAUGCGC | 7216 | UUGCUGCUUGGGCUGAGUGAC |
| 4613 | GGGCCAUCGCACACAUGCGCU | 7217 | UGCUGCUUGGGCUGAGUGACC |
| 4614 | GGCCAUCGCACACAUGCGCUC | 7218 | GCUGCUUGGGCUGAGUGACCA |
| 4615 | GCCAUCGCACACAUGCGCUCU | 7219 | CUGCUUGGGCUGAGUGACCAC |
| 4616 | CCAUCGCACACAUGCGCUCUC | 7220 | UGCUUGGGCUGAGUGACCACU |
| 4617 | CAUCGCACACAUGCGCUCUCA | 7221 | GCUUGGGCUGAGUGACCACUC |
| 4618 | AUCGCACACAUGCGCUCUCAU | 7222 | CUUGGGCUGAGUGACCACUCA |
| 4619 | UCGCACACAUGCGCUCUCAUG | 7223 | UUGGGCUGAGUGACCACUCAU |
| 4620 | CGCACACAUGCGCUCUCAUGC | 7224 | UGGGCUGAGUGACCACUCAUA |
| 4621 | GCACACAUGCGCUCUCAUGCC | 7225 | GGGCUGAGUGACCACUCAUAG |
| 4622 | CACACAUGCGCUCUCAUGCCA | 7226 | GGCUGAGUGACCACUCAUAGC |
| 4623 | ACACAUGCGCUCUCAUGCCAC | 7227 | GCUGAGUGACCACUCAUAGCU |
| 4624 | CACAUGCGCUCUCAUGCCACA | 7228 | CUGAGUGACCACUCAUAGCUG |
| 4625 | ACAUGCGCUCUCAUGCCACAA | 7229 | UGAGUGACCACUCAUAGCUGG |
| 4626 | CAUGCGCUCUCAUGCCACAAC | 7230 | GAGUGACCACUCAUAGCUGGU |
| 4627 | AUGCGCUCUCAUGCCACAACA | 7231 | AGUGACCACUCAUAGCUGGUG |
| 4628 | UGCGCUCUCAUGCCACAACAU | 7232 | GUGACCACUCAUAGCUGGUGA |
| 4629 | GCGCUCUCAUGCCACAACAUU | 7233 | UGACCACUCAUAGCUGGUGAU |
| 4630 | CGCUCUCAUGCCACAACAUUC | 7234 | GACCACUCAUAGCUGGUGAUG |
| 4631 | GCUCUCAUGCCACAACAUUCC | 7235 | ACCACUCAUAGCUGGUGAUGC |
| 4632 | CUCUCAUGCCACAACAUUCCA | 7236 | CCACUCAUAGCUGGUGAUGCC |
| 4633 | UCUCAUGCCACAACAUUCCAG | 7237 | CACUCAUAGCUGGUGAUGCCA |
| 4634 | CUCAUGCCACAACAUUCCAGU | 7238 | ACUCAUAGCUGGUGAUGCCAU |
| 4635 | UCAUGCCACAACAUUCCAGUC | 7239 | CUCAUAGCUGGUGAUGCCAUG |
| 4636 | CAUGCCACAACAUUCCAGUCC | 7240 | UCAUAGCUGGUGAUGCCAUGA |
| 4637 | AUGCCACAACAUUCCAGUCCA | 7241 | CAUAGCUGGUGAUGCCAUGAU |
| 4638 | UGCCACAACAUUCCAGUCCAU | 7242 | AUAGCUGGUGAUGCCAUGAUC |
| 4639 | GCCACAACAUUCCAGUCCAUC | 7243 | UAGCUGGUGAUGCCAUGAUCA |
| 4640 | CCACAACAUUCCAGUCCAUCU | 7244 | AGCUGGUGAUGCCAUGAUCAU |
| 4641 | CACAACAUUCCAGUCCAUCUG | 7245 | GCUGGUGAUGCCAUGAUCAUC |
| 4642 | ACAACAUUCCAGUCCAUCUGG | 7246 | CUGGUGAUGCCAUGAUCAUCA |
| 4643 | CAACAUUCCAGUCCAUCUGGG | 7247 | UGGUGAUGCCAUGAUCAUCAG |
| 4644 | AACAUUCCAGUCCAUCUGGGG | 7248 | GGUGAUGCCAUGAUCAUCAGU |
| 4645 | ACAUUCCAGUCCAUCUGGGGC | 7249 | GUGAUGCCAUGAUCAUCAGUG |
| 4646 | CAUUCCAGUCCAUCUGGGGCU | 7250 | UGAUGCCAUGAUCAUCAGUGC |
| 4647 | AUUCCAGUCCAUCUGGGGCUA | 7251 | GAUGCCAUGAUCAUCAGUGCU |
| 4648 | UUCCAGUCCAUCUGGGGCUAU | 7252 | AUGCCAUGAUCAUCAGUGCUC |
| 4649 | UCCAGUCCAUCUGGGGCUAUC | 7253 | UGCCAUGAUCAUCAGUGCUCU |
| 4650 | CCAGUCCAUCUGGGGCUAUCU | 7254 | GCCAUGAUCAUCAGUGCUCUG |
| 4651 | CAGUCCAUCUGGGGCUAUCUC | 7255 | CCAUGAUCAUCAGUGCUCUGG |
| 4652 | AGUCCAUCUGGGGCUAUCUCC | 7256 | CAUGAUCAUCAGUGCUCUGGU |
| 4653 | GUCCAUCUGGGGCUAUCUCCU | 7257 | AUGAUCAUCAGUGCUCUGGUU |
| 4654 | UCCAUCUGGGGCUAUCUCCUC | 7258 | UGAUCAUCAGUGCUCUGGUUC |
| 4655 | CCAUCUGGGGCUAUCUCCUCU | 7259 | GAUCAUCAGUGCUCUGGUUCC |
| 4656 | CAUCUGGGGCUAUCUCCUCUG | 7260 | AUCAUCAGUGCUCUGGUUCCC |
| 4657 | AUCUGGGGCUAUCUCCUCUGG | 7261 | UCAUCAGUGCUCUGGUUCCCA |
| 4658 | UCUGGGGCUAUCUCCUCUGGG | 7262 | CAUCAGUGCUCUGGUUCCCAA |
| 4659 | CUGGGGCUAUCUCCUCUGGGG | 7263 | AUCAGUGCUCUGGUUCCCAAA |
| 4660 | UGGGGCUAUCUCCUCUGGGGA | 7264 | UCAGUGCUCUGGUUCCCAAAG |
| 4661 | GGGGCUAUCUCCUCUGGGGAC | 7265 | CAGUGCUCUGGUUCCCAAAGA |
| 4662 | GGGCUAUCUCCUCUGGGGACA | 7266 | AGUGCUCUGGUUCCCAAAGAG |
| 4663 | GGCUAUCUCCUCUGGGGACAG | 7267 | GUGCUCUGGUUCCCAAAGAGG |
| 4664 | GCUAUCUCCUCUGGGGACAGG | 7268 | UGCUCUGGUUCCCAAAGAGGG |
| 4665 | CUAUCUCCUCUGGGGACAGGG | 7269 | GCUCUGGUUCCCAAAGAGGGU |
| 4666 | UAUCUCCUCUGGGGACAGGGA | 7270 | CUCUGGUUCCCAAAGAGGGUG |
| 4667 | AUCUCCUCUGGGGACAGGGAG | 7271 | UCUGGUUCCCAAAGAGGGUGA |
| 4668 | UCUCCUCUGGGGACAGGGAGC | 7272 | CUGGUUCCCAAAGAGGGUGAU |
| 4669 | CUCCUCUGGGGACAGGGAGCG | 7273 | UGGUUCCCAAAGAGGGUGAUG |
| 4670 | UCCUCUGGGGACAGGGAGCGG | 7274 | GGUUCCCAAAGAGGGUGAUGG |
| 4671 | CCUCUGGGGACAGGGAGCGGU | 7275 | GUUCCCAAAGAGGGUGAUGGA |
| 4672 | CUCUGGGGACAGGGAGCGGUG | 7276 | UUCCCAAAGAGGGUGAUGGAG |
| 4673 | UCUGGGGACAGGGAGCGGUGG | 7277 | UCCCAAAGAGGGUGAUGGAGU |
| 4674 | CUGGGGACAGGGAGCGGUGGC | 7278 | CCCAAAGAGGGUGAUGGAGUU |
| 4675 | UGGGGACAGGGAGCGGUGGCC | 7279 | CCAAAGAGGGUGAUGGAGUUU |
| 4676 | GGGGACAGGGAGCGGUGGCCU | 7280 | CAAAGAGGGUGAUGGAGUUUU |
| 4677 | GGGACAGGGAGCGGUGGCCUA | 7281 | AAAGAGGGUGAUGGAGUUUUG |
| 4678 | GGACAGGGAGCGGUGGCCUAA | 7282 | AAGAGGGUGAUGGAGUUUUGG |
| 4679 | GACAGGGAGCGGUGGCCUAAG | 7283 | AGAGGGUGAUGGAGUUUUGGG |
| 4680 | ACAGGGAGCGGUGGCCUAAGC | 7284 | GAGGGUGAUGGAGUUUUGGGG |
| 4681 | CAGGGAGCGGUGGCCUAAGCC | 7285 | AGGGUGAUGGAGUUUUGGGGC |
| 4682 | AGGGAGCGGUGGCCUAAGCCC | 7286 | GGGUGAUGGAGUUUUGGGGCA |
| 4683 | GGGAGCGGUGGCCUAAGCCCC | 7287 | GGUGAUGGAGUUUUGGGGCAG |
| 4684 | GGAGCGGUGGCCUAAGCCCCG | 7288 | GUGAUGGAGUUUUGGGGCAGG |
| 4685 | GAGCGGUGGCCUAAGCCCCGA | 7289 | UGAUGGAGUUUUGGGGCAGGG |
| 4686 | AGCGGUGGCCUAAGCCCCGAA | 7290 | GAUGGAGUUUUGGGGCAGGGU |
| 4687 | GCGGUGGCCUAAGCCCCGAAG | 7291 | AUGGAGUUUUGGGGCAGGGUG |
| 4688 | CGGUGGCCUAAGCCCCGAAGC | 7292 | UGGAGUUUUGGGGCAGGGUGA |
| 4689 | GGUGGCCUAAGCCCCGAAGCA | 7293 | GGAGUUUUGGGGCAGGGUGAU |
| 4690 | GUGGCCUAAGCCCCGAAGCAG | 7294 | GAGUUUUGGGGCAGGGUGAUC |
| 4691 | UGGCCUAAGCCCCGAAGCAGC | 7295 | AGUUUUGGGGCAGGGUGAUCA |
| 4692 | GGCCUAAGCCCCGAAGCAGCA | 7296 | GUUUUGGGGCAGGGUGAUCAC |
| 4693 | GCCUAAGCCCCGAAGCAGCAG | 7297 | UUUUGGGGCAGGGUGAUCACU |
| 4694 | CCUAAGCCCCGAAGCAGCAGG | 7298 | UUUGGGGCAGGGUGAUCACUU |
| 4695 | CUAAGCCCCGAAGCAGCAGGU | 7299 | UUGGGGCAGGGUGAUCACUUG |
| 4696 | UAAGCCCCGAAGCAGCAGGUG | 7300 | UGGGGCAGGGUGAUCACUUGG |
| 4697 | AAGCCCCGAAGCAGCAGGUGC | 7301 | GGGGCAGGGUGAUCACUUGGU |
| 4698 | AGCCCCGAAGCAGCAGGUGCC | 7302 | GGGCAGGGUGAUCACUUGGUU |
| 4699 | GCCCCGAAGCAGCAGGUGCCG | 7303 | GGCAGGGUGAUCACUUGGUUG |
| 4700 | CCCCGAAGCAGCAGGUGCCGG | 7304 | GCAGGGUGAUCACUUGGUUGG |
| 4701 | CCCGAAGCAGCAGGUGCCGGU | 7305 | CAGGGUGAUCACUUGGUUGGG |
| 4702 | CCGAAGCAGCAGGUGCCGGUC | 7306 | AGGGUGAUCACUUGGUUGGGG |
| 4703 | CGAAGCAGCAGGUGCCGGUCA | 7307 | GGGUGAUCACUUGGUUGGGGC |
| 4704 | GAAGCAGCAGGUGCCGGUCAG | 7308 | GGUGAUCACUUGGUUGGGGCC |
| 4705 | AAGCAGCAGGUGCCGGUCAGA | 7309 | GUGAUCACUUGGUUGGGGCCU |
| 4706 | AGCAGCAGGUGCCGGUCAGAU | 7310 | UGAUCACUUGGUUGGGGCCUG |
| 4707 | GCAGCAGGUGCCGGUCAGAUG | 7311 | GAUCACUUGGUUGGGGCCUGC |
| 4708 | CAGCAGGUGCCGGUCAGAUGG | 7312 | AUCACUUGGUUGGGGCCUGCG |
| 4709 | AGCAGGUGCCGGUCAGAUGGA | 7313 | UCACUUGGUUGGGGCCUGCGU |
| 4710 | GCAGGUGCCGGUCAGAUGGAG | 7314 | CACUUGGUUGGGGCCUGCGUU |
| 4711 | CAGGUGCCGGUCAGAUGGAGA | 7315 | ACUUGGUUGGGGCCUGCGUUG |
| 4712 | AGGUGCCGGUCAGAUGGAGAG | 7316 | CUUGGUUGGGGCCUGCGUUGG |
| 4713 | GGUGCCGGUCAGAUGGAGAGG | 7317 | UUGGUUGGGGCCUGCGUUGGC |
| 4714 | GUGCCGGUCAGAUGGAGAGGA | 7318 | UGGUUGGGGCCUGCGUUGGCC |
| 4715 | UGCCGGUCAGAUGGAGAGGAG | 7319 | GGUUGGGGCCUGCGUUGGCCA |
| 4716 | GCCGGUCAGAUGGAGAGGAGG | 7320 | GUUGGGGCCUGCGUUGGCCAC |
| 4717 | CCGGUCAGAUGGAGAGGAGGG | 7321 | UUGGGGCCUGCGUUGGCCACA |
| 4718 | CGGUCAGAUGGAGAGGAGGGA | 7322 | UGGGGCCUGCGUUGGCCACAG |
| 4719 | GGUCAGAUGGAGAGGAGGGAG | 7323 | GGGGCCUGCGUUGGCCACAGG |
| 4720 | GUCAGAUGGAGAGGAGGGAGG | 7324 | GGGCCUGCGUUGGCCACAGGG |
| 4721 | UCAGAUGGAGAGGAGGGAGGC | 7325 | GGCCUGCGUUGGCCACAGGGG |
| 4722 | CAGAUGGAGAGGAGGGAGGCC | 7326 | GCCUGCGUUGGCCACAGGGGG |
| 4723 | AGAUGGAGAGGAGGGAGGCCG | 7327 | CCUGCGUUGGCCACAGGGGGG |
| 4724 | GAUGGAGAGGAGGGAGGCCGU | 7328 | CUGCGUUGGCCACAGGGGGGU |
| 4725 | AUGGAGAGGAGGGAGGCCGUC | 7329 | UGCGUUGGCCACAGGGGGGUA |
| 4726 | UGGAGAGGAGGGAGGCCGUCU | 7330 | GCGUUGGCCACAGGGGGGUAA |
| 4727 | GGAGAGGAGGGAGGCCGUCUG | 7331 | CGUUGGCCACAGGGGGGUAAU |
| 4728 | GAGAGGAGGGAGGCCGUCUGU | 7332 | GUUGGCCACAGGGGGGUAAUC |
| 4729 | AGAGGAGGGAGGCCGUCUGUC | 7333 | UUGGCCACAGGGGGGUAAUCC |
| 4730 | GAGGAGGGAGGCCGUCUGUCC | 7334 | UGGCCACAGGGGGGUAAUCCA |
| 4731 | AGGAGGGAGGCCGUCUGUCCA | 7335 | GGCCACAGGGGGGUAAUCCAC |
| 4732 | GGAGGGAGGCCGUCUGUCCAG | 7336 | GCCACAGGGGGGUAAUCCACA |
| 4733 | GAGGGAGGCCGUCUGUCCAGC | 7337 | CCACAGGGGGGUAAUCCACAG |
| 4734 | AGGGAGGCCGUCUGUCCAGCC | 7338 | CACAGGGGGGUAAUCCACAGC |
| 4735 | GGGAGGCCGUCUGUCCAGCCU | 7339 | ACAGGGGGGUAAUCCACAGCU |
| 4736 | GGAGGCCGUCUGUCCAGCCUG | 7340 | CAGGGGGGUAAUCCACAGCUU |
| 4737 | GAGGCCGUCUGUCCAGCCUGG | 7341 | AGGGGGGUAAUCCACAGCUUU |
| 4738 | AGGCCGUCUGUCCAGCCUGGC | 7342 | GGGGGGUAAUCCACAGCUUUG |
| 4739 | GGCCGUCUGUCCAGCCUGGCU | 7343 | GGGGGUAAUCCACAGCUUUGU |
| 4740 | GCCGUCUGUCCAGCCUGGCUG | 7344 | GGGGUAAUCCACAGCUUUGUU |
| 4741 | CCGUCUGUCCAGCCUGGCUGC | 7345 | GGGUAAUCCACAGCUUUGUUC |
| 4742 | CGUCUGUCCAGCCUGGCUGCU | 7346 | GGUAAUCCACAGCUUUGUUCA |
| 4743 | GUCUGUCCAGCCUGGCUGCUC | 7347 | GUAAUCCACAGCUUUGUUCAC |
| 4744 | UCUGUCCAGCCUGGCUGCUCU | 7348 | UAAUCCACAGCUUUGUUCACU |
| 4745 | CUGUCCAGCCUGGCUGCUCUG | 7349 | AAUCCACAGCUUUGUUCACUG |
| 4746 | UGUCCAGCCUGGCUGCUCUGA | 7350 | AUCCACAGCUUUGUUCACUGU |
| 4747 | GUCCAGCCUGGCUGCUCUGAC | 7351 | UCCACAGCUUUGUUCACUGUC |
| 4748 | UCCAGCCUGGCUGCUCUGACA | 7352 | CCACAGCUUUGUUCACUGUCA |
| 4749 | CCAGCCUGGCUGCUCUGACAA | 7353 | CACAGCUUUGUUCACUGUCAG |
| 4750 | CAGCCUGGCUGCUCUGACAAG | 7354 | ACAGCUUUGUUCACUGUCAGG |
| 4751 | AGCCUGGCUGCUCUGACAAGG | 7355 | CAGCUUUGUUCACUGUCAGGU |
| 4752 | GCCUGGCUGCUCUGACAAGGG | 7356 | AGCUUUGUUCACUGUCAGGUU |
| 4753 | CCUGGCUGCUCUGACAAGGGC | 7357 | GCUUUGUUCACUGUCAGGUUU |
| 4754 | CUGGCUGCUCUGACAAGGGCC | 7358 | CUUUGUUCACUGUCAGGUUUG |
| 4755 | UGGCUGCUCUGACAAGGGCCC | 7359 | UUUGUUCACUGUCAGGUUUGC |
| 4756 | GGCUGCUCUGACAAGGGCCCU | 7360 | UUGUUCACUGUCAGGUUUGCA |
| 4757 | GCUGCUCUGACAAGGGCCCUG | 7361 | UGUUCACUGUCAGGUUUGCAG |
| 4758 | CUGCUCUGACAAGGGCCCUGG | 7362 | GUUCACUGUCAGGUUUGCAGU |
| 4759 | UGCUCUGACAAGGGCCCUGGC | 7363 | UUCACUGUCAGGUUUGCAGUA |
| 4760 | GCUCUGACAAGGGCCCUGGCA | 7364 | UCACUGUCAGGUUUGCAGUAG |
| 4761 | CUCUGACAAGGGCCCUGGCAG | 7365 | CACUGUCAGGUUUGCAGUAGU |
| 4762 | UCUGACAAGGGCCCUGGCAGC | 7366 | ACUGUCAGGUUUGCAGUAGUA |
| 4763 | CUGACAAGGGCCCUGGCAGCG | 7367 | CUGUCAGGUUUGCAGUAGUAG |
| 4764 | UGACAAGGGCCCUGGCAGCGA | 7368 | UGUCAGGUUUGCAGUAGUAGA |
| 4765 | GACAAGGGCCCUGGCAGCGAG | 7369 | GUCAGGUUUGCAGUAGUAGAG |
| 4766 | ACAAGGGCCCUGGCAGCGAGA | 7370 | UCAGGUUUGCAGUAGUAGAGU |
| 4767 | CAAGGGCCCUGGCAGCGAGAG | 7371 | CAGGUUUGCAGUAGUAGAGUU |
| 4768 | AAGGGCCCUGGCAGCGAGAGA | 7372 | AGGUUUGCAGUAGUAGAGUUG |
| 4769 | AGGGCCCUGGCAGCGAGAGAG | 7373 | GGUUUGCAGUAGUAGAGUUGG |
| 4770 | GGGCCCUGGCAGCGAGAGAGG | 7374 | GUUUGCAGUAGUAGAGUUGGU |
| 4771 | GGCCCUGGCAGCGAGAGAGGC | 7375 | UUUGCAGUAGUAGAGUUGGUA |
| 4772 | GCCCUGGCAGCGAGAGAGGCC | 7376 | UUGCAGUAGUAGAGUUGGUAG |
| 4773 | CCCUGGCAGCGAGAGAGGCCA | 7377 | UGCAGUAGUAGAGUUGGUAGC |
| 4774 | CCUGGCAGCGAGAGAGGCCAC | 7378 | GCAGUAGUAGAGUUGGUAGCU |
| 4775 | CUGGCAGCGAGAGAGGCCACC | 7379 | CAGUAGUAGAGUUGGUAGCUC |
| 4776 | UGGCAGCGAGAGAGGCCACCC | 7380 | AGUAGUAGAGUUGGUAGCUCC |
| 4777 | GGCAGCGAGAGAGGCCACCCG | 7381 | GUAGUAGAGUUGGUAGCUCCA |
| 4778 | GCAGCGAGAGAGGCCACCCGC | 7382 | UAGUAGAGUUGGUAGCUCCAU |
| 4779 | CAGCGAGAGAGGCCACCCGCC | 7383 | AGUAGAGUUGGUAGCUCCAUC |
| 4780 | AGCGAGAGAGGCCACCCGCCA | 7384 | GUAGAGUUGGUAGCUCCAUCA |
| 4781 | GCGAGAGAGGCCACCCGCCAU | 7385 | UAGAGUUGGUAGCUCCAUCAG |
| 4782 | CGAGAGAGGCCACCCGCCAUC | 7386 | AGAGUUGGUAGCUCCAUCAGA |
| 4783 | GAGAGAGGCCACCCGCCAUCC | 7387 | GAGUUGGUAGCUCCAUCAGAG |
| 4784 | AGAGAGGCCACCCGCCAUCCC | 7388 | AGUUGGUAGCUCCAUCAGAGU |
| 4785 | GAGAGGCCACCCGCCAUCCCU | 7389 | GUUGGUAGCUCCAUCAGAGUC |
| 4786 | AGAGGCCACCCGCCAUCCCUG | 7390 | UUGGUAGCUCCAUCAGAGUCU |
| 4787 | GAGGCCACCCGCCAUCCCUGA | 7391 | UGGUAGCUCCAUCAGAGUCUA |
| 4788 | AGGCCACCCGCCAUCCCUGAC | 7392 | GGUAGCUCCAUCAGAGUCUAC |
| 4789 | GGCCACCCGCCAUCCCUGACA | 7393 | GUAGCUCCAUCAGAGUCUACU |
| 4790 | GCCACCCGCCAUCCCUGACAC | 7394 | UAGCUCCAUCAGAGUCUACUA |
| 4791 | CCACCCGCCAUCCCUGACACA | 7395 | AGCUCCAUCAGAGUCUACUAC |
| 4792 | CACCCGCCAUCCCUGACACAG | 7396 | GCUCCAUCAGAGUCUACUACA |
| 4793 | ACCCGCCAUCCCUGACACAGU | 7397 | CUCCAUCAGAGUCUACUACAG |
| 4794 | CCCGCCAUCCCUGACACAGUC | 7398 | UCCAUCAGAGUCUACUACAGU |
| 4795 | CCGCCAUCCCUGACACAGUCA | 7399 | CCAUCAGAGUCUACUACAGUC |
| 4796 | CGCCAUCCCUGACACAGUCAA | 7400 | CAUCAGAGUCUACUACAGUCA |
| 4797 | GCCAUCCCUGACACAGUCAAU | 7401 | AUCAGAGUCUACUACAGUCAA |
| 4798 | CCAUCCCUGACACAGUCAAUC | 7402 | UCAGAGUCUACUACAGUCAAG |
| 4799 | CAUCCCUGACACAGUCAAUCC | 7403 | CAGAGUCUACUACAGUCAAGC |
| 4800 | AUCCCUGACACAGUCAAUCCU | 7404 | AGAGUCUACUACAGUCAAGCU |
| 4801 | UCCCUGACACAGUCAAUCCUC | 7405 | GAGUCUACUACAGUCAAGCUG |
| 4802 | CCCUGACACAGUCAAUCCUCC | 7406 | AGUCUACUACAGUCAAGCUGA |
| 4803 | CCUGACACAGUCAAUCCUCCC | 7407 | GUCUACUACAGUCAAGCUGAA |
| 4804 | CUGACACAGUCAAUCCUCCCU | 7408 | UCUACUACAGUCAAGCUGAAA |
| 4805 | UGACACAGUCAAUCCUCCCUA | 7409 | CUACUACAGUCAAGCUGAAAG |
| 4806 | GACACAGUCAAUCCUCCCUAA | 7410 | UACUACAGUCAAGCUGAAAGU |
| 4807 | ACACAGUCAAUCCUCCCUAAU | 7411 | ACUACAGUCAAGCUGAAAGUG |
| 4808 | CACAGUCAAUCCUCCCUAAUC | 7412 | CUACAGUCAAGCUGAAAGUGU |
| 4809 | ACAGUCAAUCCUCCCUAAUCU | 7413 | UACAGUCAAGCUGAAAGUGUA |
| 4810 | CAGUCAAUCCUCCCUAAUCUC | 7414 | ACAGUCAAGCUGAAAGUGUAG |
| 4811 | AGUCAAUCCUCCCUAAUCUCG | 7415 | CAGUCAAGCUGAAAGUGUAGU |
| 4812 | GUCAAUCCUCCCUAAUCUCGG | 7416 | AGUCAAGCUGAAAGUGUAGUU |
| 4813 | UCAAUCCUCCCUAAUCUCGGG | 7417 | GUCAAGCUGAAAGUGUAGUUC |
| 4814 | CAAUCCUCCCUAAUCUCGGGC | 7418 | UCAAGCUGAAAGUGUAGUUCC |
| 4815 | AAUCCUCCCUAAUCUCGGGCC | 7419 | CAAGCUGAAAGUGUAGUUCCC |
| 4816 | AUCCUCCCUAAUCUCGGGCCG | 7420 | AAGCUGAAAGUGUAGUUCCCA |
| 4817 | UCCUCCCUAAUCUCGGGCCGG | 7421 | AGCUGAAAGUGUAGUUCCCAG |
| 4818 | CCUCCCUAAUCUCGGGCCGGA | 7422 | GCUGAAAGUGUAGUUCCCAGG |
| 4819 | CUCCCUAAUCUCGGGCCGGAU | 7423 | CUGAAAGUGUAGUUCCCAGGG |
| 4820 | UCCCUAAUCUCGGGCCGGAUG | 7424 | UGAAAGUGUAGUUCCCAGGGA |
| 4821 | CCCUAAUCUCGGGCCGGAUGG | 7425 | GAAAGUGUAGUUCCCAGGGAC |
| 4822 | CCUAAUCUCGGGCCGGAUGGG | 7426 | AAAGUGUAGUUCCCAGGGACG |
| 4823 | CUAAUCUCGGGCCGGAUGGGA | 7427 | AAGUGUAGUUCCCAGGGACGA |
| 4824 | UAAUCUCGGGCCGGAUGGGAG | 7428 | AGUGUAGUUCCCAGGGACGAG |
| 4825 | AAUCUCGGGCCGGAUGGGAGA | 7429 | GUGUAGUUCCCAGGGACGAGU |
| 4826 | AUCUCGGGCCGGAUGGGAGAA | 7430 | UGUAGUUCCCAGGGACGAGUU |
| 4827 | UCUCGGGCCGGAUGGGAGAAG | 7431 | GUAGUUCCCAGGGACGAGUUU |
| 4828 | CUCGGGCCGGAUGGGAGAAGG | 7432 | UAGUUCCCAGGGACGAGUUUA |
| 4829 | UCGGGCCGGAUGGGAGAAGGG | 7433 | AGUUCCCAGGGACGAGUUUAC |
| 4830 | CGGGCCGGAUGGGAGAAGGGA | 7434 | GUUCCCAGGGACGAGUUUACU |
| 4831 | GGGCCGGAUGGGAGAAGGGAG | 7435 | UUCCCAGGGACGAGUUUACUU |
| 4832 | GGCCGGAUGGGAGAAGGGAGU | 7436 | UCCCAGGGACGAGUUUACUUA |
| 4833 | GCCGGAUGGGAGAAGGGAGUG | 7437 | CCCAGGGACGAGUUUACUUAG |
| 4834 | CCGGAUGGGAGAAGGGAGUGG | 7438 | CCAGGGACGAGUUUACUUAGU |
| 4835 | CGGAUGGGAGAAGGGAGUGGG | 7439 | CAGGGACGAGUUUACUUAGUU |
| 4836 | GGAUGGGAGAAGGGAGUGGGG | 7440 | AGGGACGAGUUUACUUAGUUU |
| 4837 | GAUGGGAGAAGGGAGUGGGGC | 7441 | GGGACGAGUUUACUUAGUUUU |
| 4838 | AUGGGAGAAGGGAGUGGGGCU | 7442 | GGACGAGUUUACUUAGUUUUA |
| 4839 | UGGGAGAAGGGAGUGGGGCUC | 7443 | GACGAGUUUACUUAGUUUUAA |
| 4840 | GGGAGAAGGGAGUGGGGCUCC | 7444 | ACGAGUUUACUUAGUUUUAAU |
| 4841 | GGAGAAGGGAGUGGGGCUCCA | 7445 | CGAGUUUACUUAGUUUUAAUA |
| 4842 | GAGAAGGGAGUGGGGCUCCAG | 7446 | GAGUUUACUUAGUUUUAAUAU |
| 4843 | AGAAGGGAGUGGGGCUCCAGU | 7447 | AGUUUACUUAGUUUUAAUAUG |
| 4844 | GAAGGGAGUGGGGCUCCAGUG | 7448 | GUUUACUUAGUUUUAAUAUGG |
| 4845 | AAGGGAGUGGGGCUCCAGUGU | 7449 | UUUACUUAGUUUUAAUAUGGC |
| 4846 | AGGGAGUGGGGCUCCAGUGUU | 7450 | UUACUUAGUUUUAAUAUGGCU |
| 4847 | GGGAGUGGGGCUCCAGUGUUA | 7451 | UACUUAGUUUUAAUAUGGCUG |
| 4848 | GGAGUGGGGCUCCAGUGUUAA | 7452 | ACUUAGUUUUAAUAUGGCUGU |
| 4849 | GAGUGGGGCUCCAGUGUUAAG | 7453 | CUUAGUUUUAAUAUGGCUGUA |
| 4850 | AGUGGGGCUCCAGUGUUAAGG | 7454 | UUAGUUUUAAUAUGGCUGUAU |
| 4851 | GUGGGGCUCCAGUGUUAAGGG | 7455 | UAGUUUUAAUAUGGCUGUAUC |
| 4852 | UGGGGCUCCAGUGUUAAGGGG | 7456 | AGUUUUAAUAUGGCUGUAUCU |
| 4853 | GGGGCUCCAGUGUUAAGGGGG | 7457 | GUUUUAAUAUGGCUGUAUCUU |
| 4854 | GGGCUCCAGUGUUAAGGGGGG | 7458 | UUUUAAUAUGGCUGUAUCUUC |
| 4855 | GGCUCCAGUGUUAAGGGGGGG | 7459 | UUUAAUAUGGCUGUAUCUUCA |
| 4856 | GCUCCAGUGUUAAGGGGGGGC | 7460 | UUAAUAUGGCUGUAUCUUCAG |
| 4857 | CUCCAGUGUUAAGGGGGGGCC | 7461 | UAAUAUGGCUGUAUCUUCAGA |
| 4858 | UCCAGUGUUAAGGGGGGGCCA | 7462 | AAUAUGGCUGUAUCUUCAGAA |
| 4859 | CCAGUGUUAAGGGGGGGCCAG | 7463 | AUAUGGCUGUAUCUUCAGAAA |
| 4860 | CAGUGUUAAGGGGGGGCCAGA | 7464 | UAUGGCUGUAUCUUCAGAAAU |
| 4861 | AGUGUUAAGGGGGGGCCAGAU | 7465 | AUGGCUGUAUCUUCAGAAAUC |
| 4862 | GUGUUAAGGGGGGGCCAGAUA | 7466 | UGGCUGUAUCUUCAGAAAUCU |
| 4863 | UGUUAAGGGGGGGCCAGAUAU | 7467 | GGCUGUAUCUUCAGAAAUCUU |
| 4864 | GUUAAGGGGGGGCCAGAUAUC | 7468 | GCUGUAUCUUCAGAAAUCUUC |
| 4865 | UUAAGGGGGGGCCAGAUAUCA | 7469 | CUGUAUCUUCAGAAAUCUUCU |
| 4866 | UAAGGGGGGGCCAGAUAUCAU | 7470 | UGUAUCUUCAGAAAUCUUCUC |
| 4867 | AAGGGGGGGCCAGAUAUCAUU | 7471 | GUAUCUUCAGAAAUCUUCUCU |
| 4868 | AGGGGGGGCCAGAUAUCAUUU | 7472 | UAUCUUCAGAAAUCUUCUCUU |
| 4869 | GGGGGGGCCAGAUAUCAUUUC | 7473 | AUCUUCAGAAAUCUUCUCUUC |
| 4870 | GGGGGGCCAGAUAUCAUUUCU | 7474 | UCUUCAGAAAUCUUCUCUUCU |
| 4871 | GGGGGCCAGAUAUCAUUUCUU | 7475 | CUUCAGAAAUCUUCUCUUCUC |
| 4872 | GGGGCCAGAUAUCAUUUCUUU | 7476 | UUCAGAAAUCUUCUCUUCUCU |
| 4873 | GGGCCAGAUAUCAUUUCUUUU | 7477 | UCAGAAAUCUUCUCUUCUCUU |
| 4874 | GGCCAGAUAUCAUUUCUUUUU | 7478 | CAGAAAUCUUCUCUUCUCUUA |
| 4875 | GCCAGAUAUCAUUUCUUUUUU | 7479 | AGAAAUCUUCUCUUCUCUUAG |
| 4876 | CCAGAUAUCAUUUCUUUUUUU | 7480 | GAAAUCUUCUCUUCUCUUAGA |
| 4877 | CAGAUAUCAUUUCUUUUUUUU | 7481 | AAAUCUUCUCUUCUCUUAGAG |
| 4878 | AGAUAUCAUUUCUUUUUUUUU | 7482 | AAUCUUCUCUUCUCUUAGAGG |
| 4879 | GAUAUCAUUUCUUUUUUUUUU | 7483 | AUCUUCUCUUCUCUUAGAGGC |
| 4880 | AUAUCAUUUCUUUUUUUUUUU | 7484 | UCUUCUCUUCUCUUAGAGGCC |
| 4881 | UAUCAUUUCUUUUUUUUUUUU | 7485 | CUUCUCUUCUCUUAGAGGCCC |
| 4882 | AUCAUUUCUUUUUUUUUUUUU | 7486 | UUCUCUUCUCUUAGAGGCCCC |
| 4883 | UCAUUUCUUUUUUUUUUUUUU | 7487 | UCUCUUCUCUUAGAGGCCCCU |
| 4884 | CAUUUCUUUUUUUUUUUUUUU | 7488 | CUCUUCUCUUAGAGGCCCCUU |
| 4885 | AUUUCUUUUUUUUUUUUUUUU | 7489 | UCUUCUCUUAGAGGCCCCUUA |
| 4886 | UUUCUUUUUUUUUUUUUUUUU | 7490 | CUUCUCUUAGAGGCCCCUUAA |
| 4887 | UUCUUUUUUUUUUUUUUUUUU | 7491 | UUCUCUUAGAGGCCCCUUAAG |
| 4888 | UCUUUUUUUUUUUUUUUUUUU | 7492 | UCUCUUAGAGGCCCCUUAAGU |
| 4889 | CUUUUUUUUUUUUUUUUUUUU | 7493 | CUCUUAGAGGCCCCUUAAGUU |
| 4890 | UUUUUUUUUUUUUUUUUUUUU | 7494 | UCUUAGAGGCCCCUUAAGUUC |
| 4891 | UUUUUUUUUUUUUUUUUUUUG | 7495 | CUUAGAGGCCCCUUAAGUUCU |
| 4892 | UUUUUUUUUUUUUUUUUUUGA | 7496 | UUAGAGGCCCCUUAAGUUCUU |
| 4893 | UUUUUUUUUUUUUUUUUUGAC | 7497 | UAGAGGCCCCUUAAGUUCUUC |
| 4894 | UUUUUUUUUUUUUUUUUGACG | 7498 | AGAGGCCCCUUAAGUUCUUCC |
| 4895 | UUUUUUUUUUUUUUUUGACGG | 7499 | GAGGCCCCUUAAGUUCUUCCC |
| 4896 | UUUUUUUUUUUUUUUGACGGA | 7500 | AGGCCCCUUAAGUUCUUCCCA |
| 4897 | UUUUUUUUUUUUUUGACGGAG | 7501 | GGCCCCUUAAGUUCUUCCCAA |
| 4898 | UUUUUUUUUUUUUGACGGAGU | 7502 | GCCCCUUAAGUUCUUCCCAAU |
| 4899 | UUUUUUUUUUUUGACGGAGUC | 7503 | CCCCUUAAGUUCUUCCCAAUG |
| 4900 | UUUUUUUUUUUGACGGAGUCU | 7504 | CCCUUAAGUUCUUCCCAAUGG |
| 4901 | UUUUUUUUUUGACGGAGUCUU | 7505 | CCUUAAGUUCUUCCCAAUGGU |
| 4902 | UUUUUUUUUGACGGAGUCUUG | 7506 | CUUAAGUUCUUCCCAAUGGUA |
| 4903 | UUUUUUUUGACGGAGUCUUGC | 7507 | UUAAGUUCUUCCCAAUGGUAC |
| 4904 | UUUUUUUGACGGAGUCUUGCU | 7508 | UAAGUUCUUCCCAAUGGUACU |
| 4905 | UUUUUUGACGGAGUCUUGCUC | 7509 | AAGUUCUUCCCAAUGGUACUG |
| 4906 | UUUUUGACGGAGUCUUGCUCU | 7510 | AGUUCUUCCCAAUGGUACUGA |
| 4907 | UUUUGACGGAGUCUUGCUCUG | 7511 | GUUCUUCCCAAUGGUACUGAA |
| 4908 | UUUGACGGAGUCUUGCUCUGU | 7512 | UUCUUCCCAAUGGUACUGAAC |
| 4909 | UUGACGGAGUCUUGCUCUGUC | 7513 | UCUUCCCAAUGGUACUGAACG |
| 4910 | UGACGGAGUCUUGCUCUGUCA | 7514 | CUUCCCAAUGGUACUGAACGA |
| 4911 | GACGGAGUCUUGCUCUGUCAC | 7515 | UUCCCAAUGGUACUGAACGAU |
| 4912 | ACGGAGUCUUGCUCUGUCACU | 7516 | UCCCAAUGGUACUGAACGAUU |
| 4913 | CGGAGUCUUGCUCUGUCACUC | 7517 | CCCAAUGGUACUGAACGAUUU |
| 4914 | GGAGUCUUGCUCUGUCACUCA | 7518 | CCAAUGGUACUGAACGAUUUU |
| 4915 | GAGUCUUGCUCUGUCACUCAG | 7519 | CAAUGGUACUGAACGAUUUUA |
| 4916 | AGUCUUGCUCUGUCACUCAGG | 7520 | AAUGGUACUGAACGAUUUUAU |
| 4917 | GUCUUGCUCUGUCACUCAGGC | 7521 | AUGGUACUGAACGAUUUUAUC |
| 4918 | UCUUGCUCUGUCACUCAGGCU | 7522 | UGGUACUGAACGAUUUUAUCA |
| 4919 | CUUGCUCUGUCACUCAGGCUG | 7523 | GGUACUGAACGAUUUUAUCAU |
| 4920 | UUGCUCUGUCACUCAGGCUGG | 7524 | GUACUGAACGAUUUUAUCAUC |
| 4921 | UGCUCUGUCACUCAGGCUGGA | 7525 | UACUGAACGAUUUUAUCAUCA |
| 4922 | GCUCUGUCACUCAGGCUGGAG | 7526 | ACUGAACGAUUUUAUCAUCAU |
| 4923 | CUCUGUCACUCAGGCUGGAGU | 7527 | CUGAACGAUUUUAUCAUCAUC |
| 4924 | UCUGUCACUCAGGCUGGAGUG | 7528 | UGAACGAUUUUAUCAUCAUCA |
| 4925 | CUGUCACUCAGGCUGGAGUGC | 7529 | GAACGAUUUUAUCAUCAUCAG |
| 4926 | UGUCACUCAGGCUGGAGUGCA | 7530 | AACGAUUUUAUCAUCAUCAGU |
| 4927 | GUCACUCAGGCUGGAGUGCAG | 7531 | ACGAUUUUAUCAUCAUCAGUG |
| 4928 | UCACUCAGGCUGGAGUGCAGU | 7532 | CGAUUUUAUCAUCAUCAGUGC |
| 4929 | CACUCAGGCUGGAGUGCAGUG | 7533 | GAUUUUAUCAUCAUCAGUGCU |
| 4930 | ACUCAGGCUGGAGUGCAGUGG | 7534 | AUUUUAUCAUCAUCAGUGCUU |
| 4931 | CUCAGGCUGGAGUGCAGUGGC | 7535 | UUUUAUCAUCAUCAGUGCUUU |
| 4932 | UCAGGCUGGAGUGCAGUGGCA | 7536 | UUUAUCAUCAUCAGUGCUUUG |
| 4933 | CAGGCUGGAGUGCAGUGGCAC | 7537 | UUAUCAUCAUCAGUGCUUUGA |
| 4934 | AGGCUGGAGUGCAGUGGCACG | 7538 | UAUCAUCAUCAGUGCUUUGAC |
| 4935 | GGCUGGAGUGCAGUGGCACGA | 7539 | AUCAUCAUCAGUGCUUUGACU |
| 4936 | GCUGGAGUGCAGUGGCACGAU | 7540 | UCAUCAUCAGUGCUUUGACUG |
| 4937 | CUGGAGUGCAGUGGCACGAUC | 7541 | CAUCAUCAGUGCUUUGACUGC |
| 4938 | UGGAGUGCAGUGGCACGAUCU | 7542 | AUCAUCAGUGCUUUGACUGCC |
| 4939 | GGAGUGCAGUGGCACGAUCUU | 7543 | UCAUCAGUGCUUUGACUGCCA |
| 4940 | GAGUGCAGUGGCACGAUCUUG | 7544 | CAUCAGUGCUUUGACUGCCAU |
| 4941 | AGUGCAGUGGCACGAUCUUGG | 7545 | AUCAGUGCUUUGACUGCCAUC |
| 4942 | GUGCAGUGGCACGAUCUUGGC | 7546 | UCAGUGCUUUGACUGCCAUCA |
| 4943 | UGCAGUGGCACGAUCUUGGCU | 7547 | CAGUGCUUUGACUGCCAUCAA |
| 4944 | GCAGUGGCACGAUCUUGGCUC | 7548 | AGUGCUUUGACUGCCAUCAAU |
| 4945 | CAGUGGCACGAUCUUGGCUCA | 7549 | GUGCUUUGACUGCCAUCAAUG |
| 4946 | AGUGGCACGAUCUUGGCUCAC | 7550 | UGCUUUGACUGCCAUCAAUGA |
| 4947 | GUGGCACGAUCUUGGCUCACU | 7551 | GCUUUGACUGCCAUCAAUGAC |
| 4948 | UGGCACGAUCUUGGCUCACUG | 7552 | CUUUGACUGCCAUCAAUGACU |
| 4949 | GGCACGAUCUUGGCUCACUGC | 7553 | UUUGACUGCCAUCAAUGACUG |
| 4950 | GCACGAUCUUGGCUCACUGCA | 7554 | UUGACUGCCAUCAAUGACUGU |
| 4951 | CACGAUCUUGGCUCACUGCAG | 7555 | UGACUGCCAUCAAUGACUGUA |
| 4952 | ACGAUCUUGGCUCACUGCAGC | 7556 | GACUGCCAUCAAUGACUGUAG |
| 4953 | CGAUCUUGGCUCACUGCAGCC | 7557 | ACUGCCAUCAAUGACUGUAGA |
| 4954 | GAUCUUGGCUCACUGCAGCCU | 7558 | CUGCCAUCAAUGACUGUAGAA |
| 4955 | AUCUUGGCUCACUGCAGCCUC | 7559 | UGCCAUCAAUGACUGUAGAAG |
| 4956 | UCUUGGCUCACUGCAGCCUCC | 7560 | GCCAUCAAUGACUGUAGAAGU |
| 4957 | CUUGGCUCACUGCAGCCUCCA | 7561 | CCAUCAAUGACUGUAGAAGUG |
| 4958 | UUGGCUCACUGCAGCCUCCAC | 7562 | CAUCAAUGACUGUAGAAGUGG |
| 4959 | UGGCUCACUGCAGCCUCCACC | 7563 | AUCAAUGACUGUAGAAGUGGU |
| 4960 | GGCUCACUGCAGCCUCCACCU | 7564 | UCAAUGACUGUAGAAGUGGUU |
| 4961 | GCUCACUGCAGCCUCCACCUC | 7565 | CAAUGACUGUAGAAGUGGUUG |
| 4962 | CUCACUGCAGCCUCCACCUCC | 7566 | AAUGACUGUAGAAGUGGUUGG |
| 4963 | UCACUGCAGCCUCCACCUCCC | 7567 | AUGACUGUAGAAGUGGUUGGC |
| 4964 | CACUGCAGCCUCCACCUCCCA | 7568 | UGACUGUAGAAGUGGUUGGCA |
| 4965 | ACUGCAGCCUCCACCUCCCAG | 7569 | GACUGUAGAAGUGGUUGGCAA |
| 4966 | CUGCAGCCUCCACCUCCCAGG | 7570 | ACUGUAGAAGUGGUUGGCAAA |
| 4967 | UGCAGCCUCCACCUCCCAGGU | 7571 | CUGUAGAAGUGGUUGGCAAAG |
| 4968 | GCAGCCUCCACCUCCCAGGUU | 7572 | UGUAGAAGUGGUUGGCAAAGA |
| 4969 | CAGCCUCCACCUCCCAGGUUU | 7573 | GUAGAAGUGGUUGGCAAAGAG |
| 4970 | AGCCUCCACCUCCCAGGUUUA | 7574 | UAGAAGUGGUUGGCAAAGAGA |
| 4971 | GCCUCCACCUCCCAGGUUUAA | 7575 | AGAAGUGGUUGGCAAAGAGAU |
| 4972 | CCUCCACCUCCCAGGUUUAAG | 7576 | GAAGUGGUUGGCAAAGAGAUC |
| 4973 | CUCCACCUCCCAGGUUUAAGC | 7577 | AAGUGGUUGGCAAAGAGAUCU |
| 4974 | UCCACCUCCCAGGUUUAAGCA | 7578 | AGUGGUUGGCAAAGAGAUCUC |
| 4975 | CCACCUCCCAGGUUUAAGCAA | 7579 | GUGGUUGGCAAAGAGAUCUCC |
| 4976 | CACCUCCCAGGUUUAAGCAAU | 7580 | UGGUUGGCAAAGAGAUCUCCU |
| 4977 | ACCUCCCAGGUUUAAGCAAUU | 7581 | GGUUGGCAAAGAGAUCUCCUG |
| 4978 | CCUCCCAGGUUUAAGCAAUUC | 7582 | GUUGGCAAAGAGAUCUCCUGG |
| 4979 | CUCCCAGGUUUAAGCAAUUCU | 7583 | UUGGCAAAGAGAUCUCCUGGA |
| 4980 | UCCCAGGUUUAAGCAAUUCUC | 7584 | UGGCAAAGAGAUCUCCUGGAA |
| 4981 | CCCAGGUUUAAGCAAUUCUCC | 7585 | GGCAAAGAGAUCUCCUGGAAC |
| 4982 | CCAGGUUUAAGCAAUUCUCCU | 7586 | GCAAAGAGAUCUCCUGGAACU |
| 4983 | CAGGUUUAAGCAAUUCUCCUG | 7587 | CAAAGAGAUCUCCUGGAACUG |
| 4984 | AGGUUUAAGCAAUUCUCCUGC | 7588 | AAAGAGAUCUCCUGGAACUGA |
| 4985 | GGUUUAAGCAAUUCUCCUGCC | 7589 | AAGAGAUCUCCUGGAACUGAG |
| 4986 | GUUUAAGCAAUUCUCCUGCCU | 7590 | AGAGAUCUCCUGGAACUGAGG |
| 4987 | UUUAAGCAAUUCUCCUGCCUC | 7591 | GAGAUCUCCUGGAACUGAGGU |
| 4988 | UUAAGCAAUUCUCCUGCCUCA | 7592 | AGAUCUCCUGGAACUGAGGUG |
| 4989 | UAAGCAAUUCUCCUGCCUCAG | 7593 | GAUCUCCUGGAACUGAGGUGA |
| 4990 | AAGCAAUUCUCCUGCCUCAGC | 7594 | AUCUCCUGGAACUGAGGUGAC |
| 4991 | AGCAAUUCUCCUGCCUCAGCC | 7595 | UCUCCUGGAACUGAGGUGACA |
| 4992 | GCAAUUCUCCUGCCUCAGCCU | 7596 | CUCCUGGAACUGAGGUGACAC |
| 4993 | CAAUUCUCCUGCCUCAGCCUC | 7597 | UCCUGGAACUGAGGUGACACA |
| 4994 | AAUUCUCCUGCCUCAGCCUCC | 7598 | CCUGGAACUGAGGUGACACAA |
| 4995 | AUUCUCCUGCCUCAGCCUCCC | 7599 | CUGGAACUGAGGUGACACAAU |
| 4996 | UUCUCCUGCCUCAGCCUCCCG | 7600 | UGGAACUGAGGUGACACAAUA |
| 4997 | UCUCCUGCCUCAGCCUCCCGA | 7601 | GGAACUGAGGUGACACAAUAG |
| 4998 | CUCCUGCCUCAGCCUCCCGAG | 7602 | GAACUGAGGUGACACAAUAGC |
| 4999 | UCCUGCCUCAGCCUCCCGAGU | 7603 | AACUGAGGUGACACAAUAGCA |
| 5000 | CCUGCCUCAGCCUCCCGAGUA | 7604 | ACUGAGGUGACACAAUAGCAA |
| 5001 | CUGCCUCAGCCUCCCGAGUAG | 7605 | CUGAGGUGACACAAUAGCAAU |
| 5002 | UGCCUCAGCCUCCCGAGUAGC | 7606 | UGAGGUGACACAAUAGCAAUG |
| 5003 | GCCUCAGCCUCCCGAGUAGCU | 7607 | GAGGUGACACAAUAGCAAUGG |
| 5004 | CCUCAGCCUCCCGAGUAGCUG | 7608 | AGGUGACACAAUAGCAAUGGG |
| 5005 | CUCAGCCUCCCGAGUAGCUGG | 7609 | GGUGACACAAUAGCAAUGGGG |
| 5006 | UCAGCCUCCCGAGUAGCUGGG | 7610 | GUGACACAAUAGCAAUGGGGG |
| 5007 | CAGCCUCCCGAGUAGCUGGGA | 7611 | UGACACAAUAGCAAUGGGGGG |
| 5008 | AGCCUCCCGAGUAGCUGGGAU | 7612 | GACACAAUAGCAAUGGGGGGC |
| 5009 | GCCUCCCGAGUAGCUGGGAUU | 7613 | ACACAAUAGCAAUGGGGGGCC |
| 5010 | CCUCCCGAGUAGCUGGGAUUA | 7614 | CACAAUAGCAAUGGGGGGCCG |
| 5011 | CUCCCGAGUAGCUGGGAUUAC | 7615 | ACAAUAGCAAUGGGGGGCCGA |
| 5012 | UCCCGAGUAGCUGGGAUUACA | 7616 | CAAUAGCAAUGGGGGGCCGAU |
| 5013 | CCCGAGUAGCUGGGAUUACAG | 7617 | AAUAGCAAUGGGGGGCCGAUU |
| 5014 | CCGAGUAGCUGGGAUUACAGG | 7618 | AUAGCAAUGGGGGGCCGAUUC |
| 5015 | CGAGUAGCUGGGAUUACAGGC | 7619 | UAGCAAUGGGGGGCCGAUUCU |
| 5016 | GAGUAGCUGGGAUUACAGGCA | 7620 | AGCAAUGGGGGGCCGAUUCUU |
| 5017 | AGUAGCUGGGAUUACAGGCAU | 7621 | GCAAUGGGGGGCCGAUUCUUA |
| 5018 | GUAGCUGGGAUUACAGGCAUA | 7622 | CAAUGGGGGGCCGAUUCUUAC |
| 5019 | UAGCUGGGAUUACAGGCAUAC | 7623 | AAUGGGGGGCCGAUUCUUACG |
| 5020 | AGCUGGGAUUACAGGCAUACG | 7624 | AUGGGGGGCCGAUUCUUACGG |
| 5021 | GCUGGGAUUACAGGCAUACGC | 7625 | UGGGGGGCCGAUUCUUACGGG |
| 5022 | CUGGGAUUACAGGCAUACGCC | 7626 | GGGGGGCCGAUUCUUACGGGG |
| 5023 | UGGGAUUACAGGCAUACGCCA | 7627 | GGGGGCCGAUUCUUACGGGGC |
| 5024 | GGGAUUACAGGCAUACGCCAC | 7628 | GGGGCCGAUUCUUACGGGGCU |
| 5025 | GGAUUACAGGCAUACGCCACC | 7629 | GGGCCGAUUCUUACGGGGCUC |
| 5026 | GAUUACAGGCAUACGCCACCA | 7630 | GGCCGAUUCUUACGGGGCUCU |
| 5027 | AUUACAGGCAUACGCCACCAA | 7631 | GCCGAUUCUUACGGGGCUCUG |
| 5028 | UUACAGGCAUACGCCACCAAA | 7632 | CCGAUUCUUACGGGGCUCUGG |
| 5029 | UACAGGCAUACGCCACCAAAC | 7633 | CGAUUCUUACGGGGCUCUGGC |
| 5030 | ACAGGCAUACGCCACCAAACC | 7634 | GAUUCUUACGGGGCUCUGGCU |
| 5031 | CAGGCAUACGCCACCAAACCC | 7635 | AUUCUUACGGGGCUCUGGCUU |
| 5032 | AGGCAUACGCCACCAAACCCG | 7636 | UUCUUACGGGGCUCUGGCUUG |
| 5033 | GGCAUACGCCACCAAACCCGG | 7637 | UCUUACGGGGCUCUGGCUUGA |
| 5034 | GCAUACGCCACCAAACCCGGC | 7638 | CUUACGGGGCUCUGGCUUGAC |
| 5035 | CAUACGCCACCAAACCCGGCU | 7639 | UUACGGGGCUCUGGCUUGACU |
| 5036 | AUACGCCACCAAACCCGGCUA | 7640 | UACGGGGCUCUGGCUUGACUG |
| 5037 | UACGCCACCAAACCCGGCUAA | 7641 | ACGGGGCUCUGGCUUGACUGU |
| 5038 | ACGCCACCAAACCCGGCUAAU | 7642 | CGGGGCUCUGGCUUGACUGUC |
| 5039 | CGCCACCAAACCCGGCUAAUU | 7643 | GGGGCUCUGGCUUGACUGUCA |
| 5040 | GCCACCAAACCCGGCUAAUUU | 7644 | GGGCUCUGGCUUGACUGUCAC |
| 5041 | CCACCAAACCCGGCUAAUUUU | 7645 | GGCUCUGGCUUGACUGUCACG |
| 5042 | CACCAAACCCGGCUAAUUUUU | 7646 | GCUCUGGCUUGACUGUCACGU |
| 5043 | ACCAAACCCGGCUAAUUUUUU | 7647 | CUCUGGCUUGACUGUCACGUU |
| 5044 | CCAAACCCGGCUAAUUUUUUU | 7648 | UCUGGCUUGACUGUCACGUUC |
| 5045 | CAAACCCGGCUAAUUUUUUUU | 7649 | CUGGCUUGACUGUCACGUUCA |
| 5046 | AAACCCGGCUAAUUUUUUUUU | 7650 | UGGCUUGACUGUCACGUUCAC |
| 5047 | AACCCGGCUAAUUUUUUUUUU | 7651 | GGCUUGACUGUCACGUUCACA |
| 5048 | ACCCGGCUAAUUUUUUUUUUU | 7652 | GCUUGACUGUCACGUUCACAU |
| 5049 | CCCGGCUAAUUUUUUUUUUUA | 7653 | CUUGACUGUCACGUUCACAUA |
| 5050 | CCGGCUAAUUUUUUUUUUUAU | 7654 | UUGACUGUCACGUUCACAUAG |
| 5051 | CGGCUAAUUUUUUUUUUUAUU | 7655 | UGACUGUCACGUUCACAUAGC |
| 5052 | GGCUAAUUUUUUUUUUUAUUU | 7656 | GACUGUCACGUUCACAUAGCC |
| 5053 | GCUAAUUUUUUUUUUUAUUUU | 7657 | ACUGUCACGUUCACAUAGCCU |
| 5054 | CUAAUUUUUUUUUUUAUUUUU | 7658 | CUGUCACGUUCACAUAGCCUU |
| 5055 | UAAUUUUUUUUUUUAUUUUUA | 7659 | UGUCACGUUCACAUAGCCUUC |
| 5056 | AAUUUUUUUUUUUAUUUUUAG | 7660 | GUCACGUUCACAUAGCCUUCC |
| 5057 | AUUUUUUUUUUUAUUUUUAGU | 7661 | UCACGUUCACAUAGCCUUCCC |
| 5058 | UUUUUUUUUUUAUUUUUAGUA | 7662 | CACGUUCACAUAGCCUUCCCC |
| 5059 | UUUUUUUUUUAUUUUUAGUAG | 7663 | ACGUUCACAUAGCCUUCCCCA |
| 5060 | UUUUUUUUUAUUUUUAGUAGA | 7664 | CGUUCACAUAGCCUUCCCCAU |
| 5061 | UUUUUUUUAUUUUUAGUAGAG | 7665 | GUUCACAUAGCCUUCCCCAUG |
| 5062 | UUUUUUUAUUUUUAGUAGAGA | 7666 | UUCACAUAGCCUUCCCCAUGG |
| 5063 | UUUUUUAUUUUUAGUAGAGAU | 7667 | UCACAUAGCCUUCCCCAUGGG |
| 5064 | UUUUUAUUUUUAGUAGAGAUG | 7668 | CACAUAGCCUUCCCCAUGGGC |
| 5065 | UUUUAUUUUUAGUAGAGAUGG | 7669 | ACAUAGCCUUCCCCAUGGGCA |
| 5066 | UUUAUUUUUAGUAGAGAUGGG | 7670 | CAUAGCCUUCCCCAUGGGCAU |
| 5067 | UUAUUUUUAGUAGAGAUGGGG | 7671 | AUAGCCUUCCCCAUGGGCAUU |
| 5068 | UAUUUUUAGUAGAGAUGGGGU | 7672 | UAGCCUUCCCCAUGGGCAUUU |
| 5069 | AUUUUUAGUAGAGAUGGGGUU | 7673 | AGCCUUCCCCAUGGGCAUUUU |
| 5070 | UUUUUAGUAGAGAUGGGGUUU | 7674 | GCCUUCCCCAUGGGCAUUUUG |
| 5071 | UUUUAGUAGAGAUGGGGUUUC | 7675 | CCUUCCCCAUGGGCAUUUUGA |
| 5072 | UUUAGUAGAGAUGGGGUUUCA | 7676 | CUUCCCCAUGGGCAUUUUGAC |
| 5073 | UUAGUAGAGAUGGGGUUUCAC | 7677 | UUCCCCAUGGGCAUUUUGACC |
| 5074 | UAGUAGAGAUGGGGUUUCACC | 7678 | UCCCCAUGGGCAUUUUGACCC |
| 5075 | AGUAGAGAUGGGGUUUCACCG | 7679 | CCCCAUGGGCAUUUUGACCCU |
| 5076 | GUAGAGAUGGGGUUUCACCGU | 7680 | CCCAUGGGCAUUUUGACCCUC |
| 5077 | UAGAGAUGGGGUUUCACCGUG | 7681 | CCAUGGGCAUUUUGACCCUCU |
| 5078 | AGAGAUGGGGUUUCACCGUGU | 7682 | CAUGGGCAUUUUGACCCUCUA |
| 5079 | GAGAUGGGGUUUCACCGUGUU | 7683 | AUGGGCAUUUUGACCCUCUAC |
| 5080 | AGAUGGGGUUUCACCGUGUUA | 7684 | UGGGCAUUUUGACCCUCUACA |
| 5081 | GAUGGGGUUUCACCGUGUUAG | 7685 | GGGCAUUUUGACCCUCUACAA |
| 5082 | AUGGGGUUUCACCGUGUUAGC | 7686 | GGCAUUUUGACCCUCUACAAU |
| 5083 | UGGGGUUUCACCGUGUUAGCC | 7687 | GCAUUUUGACCCUCUACAAUC |
| 5084 | GGGGUUUCACCGUGUUAGCCA | 7688 | CAUUUUGACCCUCUACAAUCA |
| 5085 | GGGUUUCACCGUGUUAGCCAG | 7689 | AUUUUGACCCUCUACAAUCAC |
| 5086 | GGUUUCACCGUGUUAGCCAGG | 7690 | UUUUGACCCUCUACAAUCACU |
| 5087 | GUUUCACCGUGUUAGCCAGGG | 7691 | UUUGACCCUCUACAAUCACUU |
| 5088 | UUUCACCGUGUUAGCCAGGGU | 7692 | UUGACCCUCUACAAUCACUUU |
| 5089 | UUCACCGUGUUAGCCAGGGUG | 7693 | UGACCCUCUACAAUCACUUUG |
| 5090 | UCACCGUGUUAGCCAGGGUGG | 7694 | GACCCUCUACAAUCACUUUGA |
| 5091 | CACCGUGUUAGCCAGGGUGGU | 7695 | ACCCUCUACAAUCACUUUGAA |
| 5092 | ACCGUGUUAGCCAGGGUGGUC | 7696 | CCCUCUACAAUCACUUUGAAU |
| 5093 | CCGUGUUAGCCAGGGUGGUCU | 7697 | CCUCUACAAUCACUUUGAAUU |
| 5094 | CGUGUUAGCCAGGGUGGUCUU | 7698 | CUCUACAAUCACUUUGAAUUC |
| 5095 | GUGUUAGCCAGGGUGGUCUUG | 7699 | UCUACAAUCACUUUGAAUUCA |
| 5096 | UGUUAGCCAGGGUGGUCUUGA | 7700 | CUACAAUCACUUUGAAUUCAU |
| 5097 | GUUAGCCAGGGUGGUCUUGAU | 7701 | UACAAUCACUUUGAAUUCAUA |
| 5098 | UUAGCCAGGGUGGUCUUGAUC | 7702 | ACAAUCACUUUGAAUUCAUAC |
| 5099 | UAGCCAGGGUGGUCUUGAUCU | 7703 | CAAUCACUUUGAAUUCAUACA |
| 5100 | AGCCAGGGUGGUCUUGAUCUC | 7704 | AAUCACUUUGAAUUCAUACAG |
| 5101 | GCCAGGGUGGUCUUGAUCUCC | 7705 | AUCACUUUGAAUUCAUACAGG |
| 5102 | CCAGGGUGGUCUUGAUCUCCU | 7706 | UCACUUUGAAUUCAUACAGGC |
| 5103 | CAGGGUGGUCUUGAUCUCCUG | 7707 | CACUUUGAAUUCAUACAGGCC |
| 5104 | AGGGUGGUCUUGAUCUCCUGA | 7708 | ACUUUGAAUUCAUACAGGCCU |
| 5105 | GGGUGGUCUUGAUCUCCUGAC | 7709 | CUUUGAAUUCAUACAGGCCUG |
| 5106 | GGUGGUCUUGAUCUCCUGACC | 7710 | UUUGAAUUCAUACAGGCCUGG |
| 5107 | GUGGUCUUGAUCUCCUGACCU | 7711 | UUGAAUUCAUACAGGCCUGGA |
| 5108 | UGGUCUUGAUCUCCUGACCUC | 7712 | UGAAUUCAUACAGGCCUGGAG |
| 5109 | GGUCUUGAUCUCCUGACCUCA | 7713 | GAAUUCAUACAGGCCUGGAGU |
| 5110 | GUCUUGAUCUCCUGACCUCAU | 7714 | AAUUCAUACAGGCCUGGAGUG |
| 5111 | UCUUGAUCUCCUGACCUCAUG | 7715 | AUUCAUACAGGCCUGGAGUGA |
| 5112 | CUUGAUCUCCUGACCUCAUGA | 7716 | UUCAUACAGGCCUGGAGUGAG |
| 5113 | UUGAUCUCCUGACCUCAUGAU | 7717 | UCAUACAGGCCUGGAGUGAGC |
| 5114 | UGAUCUCCUGACCUCAUGAUC | 7718 | CAUACAGGCCUGGAGUGAGCU |
| 5115 | GAUCUCCUGACCUCAUGAUCC | 7719 | AUACAGGCCUGGAGUGAGCUU |
| 5116 | AUCUCCUGACCUCAUGAUCCG | 7720 | UACAGGCCUGGAGUGAGCUUC |
| 5117 | UCUCCUGACCUCAUGAUCCGC | 7721 | ACAGGCCUGGAGUGAGCUUCG |
| 5118 | CUCCUGACCUCAUGAUCCGCC | 7722 | CAGGCCUGGAGUGAGCUUCGA |
| 5119 | UCCUGACCUCAUGAUCCGCCC | 7723 | AGGCCUGGAGUGAGCUUCGAU |
| 5120 | CCUGACCUCAUGAUCCGCCCG | 7724 | GGCCUGGAGUGAGCUUCGAUA |
| 5121 | CUGACCUCAUGAUCCGCCCGC | 7725 | GCCUGGAGUGAGCUUCGAUAG |
| 5122 | UGACCUCAUGAUCCGCCCGCC | 7726 | CCUGGAGUGAGCUUCGAUAGU |
| 5123 | GACCUCAUGAUCCGCCCGCCU | 7727 | CUGGAGUGAGCUUCGAUAGUU |
| 5124 | ACCUCAUGAUCCGCCCGCCUC | 7728 | UGGAGUGAGCUUCGAUAGUUU |
| 5125 | CCUCAUGAUCCGCCCGCCUCG | 7729 | GGAGUGAGCUUCGAUAGUUUG |
| 5126 | CUCAUGAUCCGCCCGCCUCGG | 7730 | GAGUGAGCUUCGAUAGUUUGA |
| 5127 | UCAUGAUCCGCCCGCCUCGGC | 7731 | AGUGAGCUUCGAUAGUUUGAG |
| 5128 | CAUGAUCCGCCCGCCUCGGCC | 7732 | GUGAGCUUCGAUAGUUUGAGG |
| 5129 | AUGAUCCGCCCGCCUCGGCCU | 7733 | UGAGCUUCGAUAGUUUGAGGA |
| 5130 | UGAUCCGCCCGCCUCGGCCUC | 7734 | GAGCUUCGAUAGUUUGAGGAU |
| 5131 | GAUCCGCCCGCCUCGGCCUCC | 7735 | AGCUUCGAUAGUUUGAGGAUC |
| 5132 | AUCCGCCCGCCUCGGCCUCCC | 7736 | GCUUCGAUAGUUUGAGGAUCU |
| 5133 | UCCGCCCGCCUCGGCCUCCCA | 7737 | CUUCGAUAGUUUGAGGAUCUG |
| 5134 | CCGCCCGCCUCGGCCUCCCAA | 7738 | UUCGAUAGUUUGAGGAUCUGG |
| 5135 | CGCCCGCCUCGGCCUCCCAAA | 7739 | UCGAUAGUUUGAGGAUCUGGG |
| 5136 | GCCCGCCUCGGCCUCCCAAAG | 7740 | CGAUAGUUUGAGGAUCUGGGA |
| 5137 | CCCGCCUCGGCCUCCCAAAGU | 7741 | GAUAGUUUGAGGAUCUGGGAA |
| 5138 | CCGCCUCGGCCUCCCAAAGUG | 7742 | AUAGUUUGAGGAUCUGGGAAU |
| 5139 | CGCCUCGGCCUCCCAAAGUGC | 7743 | UAGUUUGAGGAUCUGGGAAUG |
| 5140 | GCCUCGGCCUCCCAAAGUGCU | 7744 | AGUUUGAGGAUCUGGGAAUGU |
| 5141 | CCUCGGCCUCCCAAAGUGCUG | 7745 | GUUUGAGGAUCUGGGAAUGUU |
| 5142 | CUCGGCCUCCCAAAGUGCUGG | 7746 | UUUGAGGAUCUGGGAAUGUUU |
| 5143 | UCGGCCUCCCAAAGUGCUGGG | 7747 | UUGAGGAUCUGGGAAUGUUUC |
| 5144 | CGGCCUCCCAAAGUGCUGGGA | 7748 | UGAGGAUCUGGGAAUGUUUCC |
| 5145 | GGCCUCCCAAAGUGCUGGGAU | 7749 | GAGGAUCUGGGAAUGUUUCCC |
| 5146 | GCCUCCCAAAGUGCUGGGAUU | 7750 | AGGAUCUGGGAAUGUUUCCCU |
| 5147 | CCUCCCAAAGUGCUGGGAUUA | 7751 | GGAUCUGGGAAUGUUUCCCUU |
| 5148 | CUCCCAAAGUGCUGGGAUUAC | 7752 | GAUCUGGGAAUGUUUCCCUUC |
| 5149 | UCCCAAAGUGCUGGGAUUACA | 7753 | AUCUGGGAAUGUUUCCCUUCC |
| 5150 | CCCAAAGUGCUGGGAUUACAG | 7754 | UCUGGGAAUGUUUCCCUUCCA |
| 5151 | CCAAAGUGCUGGGAUUACAGG | 7755 | CUGGGAAUGUUUCCCUUCCAU |
| 5152 | CAAAGUGCUGGGAUUACAGGC | 7756 | UGGGAAUGUUUCCCUUCCAUU |
| 5153 | AAAGUGCUGGGAUUACAGGCG | 7757 | GGGAAUGUUUCCCUUCCAUUU |
| 5154 | AAGUGCUGGGAUUACAGGCGU | 7758 | GGAAUGUUUCCCUUCCAUUUC |
| 5155 | AGUGCUGGGAUUACAGGCGUG | 7759 | GAAUGUUUCCCUUCCAUUUCU |
| 5156 | GUGCUGGGAUUACAGGCGUGA | 7760 | AAUGUUUCCCUUCCAUUUCUC |
| 5157 | UGCUGGGAUUACAGGCGUGAG | 7761 | AUGUUUCCCUUCCAUUUCUCC |
| 5158 | GCUGGGAUUACAGGCGUGAGC | 7762 | UGUUUCCCUUCCAUUUCUCCA |
| 5159 | CUGGGAUUACAGGCGUGAGCC | 7763 | GUUUCCCUUCCAUUUCUCCAC |
| 5160 | UGGGAUUACAGGCGUGAGCCA | 7764 | UUUCCCUUCCAUUUCUCCACU |
| 5161 | GGGAUUACAGGCGUGAGCCAC | 7765 | UUCCCUUCCAUUUCUCCACUG |
| 5162 | GGAUUACAGGCGUGAGCCACC | 7766 | UCCCUUCCAUUUCUCCACUGU |
| 5163 | GAUUACAGGCGUGAGCCACCG | 7767 | CCCUUCCAUUUCUCCACUGUA |
| 5164 | AUUACAGGCGUGAGCCACCGC | 7768 | CCUUCCAUUUCUCCACUGUAG |
| 5165 | UUACAGGCGUGAGCCACCGCG | 7769 | CUUCCAUUUCUCCACUGUAGU |
| 5166 | UACAGGCGUGAGCCACCGCGC | 7770 | UUCCAUUUCUCCACUGUAGUC |
| 5167 | ACAGGCGUGAGCCACCGCGCC | 7771 | UCCAUUUCUCCACUGUAGUCU |
| 5168 | CAGGCGUGAGCCACCGCGCCC | 7772 | CCAUUUCUCCACUGUAGUCUC |
| 5169 | AGGCGUGAGCCACCGCGCCCG | 7773 | CAUUUCUCCACUGUAGUCUCU |
| 5170 | GGCGUGAGCCACCGCGCCCGG | 7774 | AUUUCUCCACUGUAGUCUCUA |
| 5171 | GCGUGAGCCACCGCGCCCGGC | 7775 | UUUCUCCACUGUAGUCUCUAG |
| 5172 | CGUGAGCCACCGCGCCCGGCC | 7776 | UUCUCCACUGUAGUCUCUAGG |
| 5173 | GUGAGCCACCGCGCCCGGCCA | 7777 | UCUCCACUGUAGUCUCUAGGA |
| 5174 | UGAGCCACCGCGCCCGGCCAU | 7778 | CUCCACUGUAGUCUCUAGGAU |
| 5175 | GAGCCACCGCGCCCGGCCAUC | 7779 | UCCACUGUAGUCUCUAGGAUG |
| 5176 | AGCCACCGCGCCCGGCCAUCA | 7780 | CCACUGUAGUCUCUAGGAUGA |
| 5177 | GCCACCGCGCCCGGCCAUCAU | 7781 | CACUGUAGUCUCUAGGAUGAG |
| 5178 | CCACCGCGCCCGGCCAUCAUU | 7782 | ACUGUAGUCUCUAGGAUGAGU |
| 5179 | CACCGCGCCCGGCCAUCAUUU | 7783 | CUGUAGUCUCUAGGAUGAGUA |
| 5180 | ACCGCGCCCGGCCAUCAUUUC | 7784 | UGUAGUCUCUAGGAUGAGUAA |
| 5181 | CCGCGCCCGGCCAUCAUUUCU | 7785 | GUAGUCUCUAGGAUGAGUAAU |
| 5182 | CGCGCCCGGCCAUCAUUUCUA | 7786 | UAGUCUCUAGGAUGAGUAAUC |
| 5183 | GCGCCCGGCCAUCAUUUCUAU | 7787 | AGUCUCUAGGAUGAGUAAUCA |
| 5184 | CGCCCGGCCAUCAUUUCUAUG | 7788 | GUCUCUAGGAUGAGUAAUCAG |
| 5185 | GCCCGGCCAUCAUUUCUAUGC | 7789 | UCUCUAGGAUGAGUAAUCAGC |
| 5186 | CCCGGCCAUCAUUUCUAUGCU | 7790 | CUCUAGGAUGAGUAAUCAGCU |
| 5187 | CCGGCCAUCAUUUCUAUGCUA | 7791 | UCUAGGAUGAGUAAUCAGCUG |
| 5188 | CGGCCAUCAUUUCUAUGCUAC | 7792 | CUAGGAUGAGUAAUCAGCUGC |
| 5189 | GGCCAUCAUUUCUAUGCUACC | 7793 | UAGGAUGAGUAAUCAGCUGCC |
| 5190 | GCCAUCAUUUCUAUGCUACCA | 7794 | AGGAUGAGUAAUCAGCUGCCA |
| 5191 | CCAUCAUUUCUAUGCUACCAU | 7795 | GGAUGAGUAAUCAGCUGCCAG |
| 5192 | CAUCAUUUCUAUGCUACCAUC | 7796 | GAUGAGUAAUCAGCUGCCAGU |
| 5193 | AUCAUUUCUAUGCUACCAUCU | 7797 | AUGAGUAAUCAGCUGCCAGUC |
| 5194 | UCAUUUCUAUGCUACCAUCUC | 7798 | UGAGUAAUCAGCUGCCAGUCG |
| 5195 | CAUUUCUAUGCUACCAUCUCA | 7799 | GAGUAAUCAGCUGCCAGUCGU |
| 5196 | AUUUCUAUGCUACCAUCUCAG | 7800 | AGUAAUCAGCUGCCAGUCGUA |
| 5197 | UUUCUAUGCUACCAUCUCAGC | 7801 | GUAAUCAGCUGCCAGUCGUAG |
| 5198 | UUCUAUGCUACCAUCUCAGCA | 7802 | UAAUCAGCUGCCAGUCGUAGG |
| 5199 | UCUAUGCUACCAUCUCAGCAU | 7803 | AAUCAGCUGCCAGUCGUAGGU |
| 5200 | CUAUGCUACCAUCUCAGCAUC | 7804 | AUCAGCUGCCAGUCGUAGGUG |
| 5201 | UAUGCUACCAUCUCAGCAUCU | 7805 | UCAGCUGCCAGUCGUAGGUGU |
| 5202 | AUGCUACCAUCUCAGCAUCUG | 7806 | CAGCUGCCAGUCGUAGGUGUA |
| 5203 | UGCUACCAUCUCAGCAUCUGU | 7807 | AGCUGCCAGUCGUAGGUGUAG |
| 5204 | GCUACCAUCUCAGCAUCUGUG | 7808 | GCUGCCAGUCGUAGGUGUAGG |
| 5205 | CUACCAUCUCAGCAUCUGUGG | 7809 | CUGCCAGUCGUAGGUGUAGGU |
| 5206 | UACCAUCUCAGCAUCUGUGGU | 7810 | UGCCAGUCGUAGGUGUAGGUU |
| 5207 | ACCAUCUCAGCAUCUGUGGUG | 7811 | GCCAGUCGUAGGUGUAGGUUU |
| 5208 | CCAUCUCAGCAUCUGUGGUGA | 7812 | CCAGUCGUAGGUGUAGGUUUC |
| 5209 | CAUCUCAGCAUCUGUGGUGAG | 7813 | CAGUCGUAGGUGUAGGUUUCU |
| 5210 | AUCUCAGCAUCUGUGGUGAGG | 7814 | AGUCGUAGGUGUAGGUUUCUC |
| 5211 | UCUCAGCAUCUGUGGUGAGGG | 7815 | GUCGUAGGUGUAGGUUUCUCC |
| 5212 | CUCAGCAUCUGUGGUGAGGGG | 7816 | UCGUAGGUGUAGGUUUCUCCU |
| 5213 | UCAGCAUCUGUGGUGAGGGGA | 7817 | CGUAGGUGUAGGUUUCUCCUU |
| 5214 | CAGCAUCUGUGGUGAGGGGAG | 7818 | GUAGGUGUAGGUUUCUCCUUU |
| 5215 | AGCAUCUGUGGUGAGGGGAGG | 7819 | UAGGUGUAGGUUUCUCCUUUA |
| 5216 | GCAUCUGUGGUGAGGGGAGGG | 7820 | AGGUGUAGGUUUCUCCUUUAG |
| 5217 | CAUCUGUGGUGAGGGGAGGGG | 7821 | GGUGUAGGUUUCUCCUUUAGG |
| 5218 | AUCUGUGGUGAGGGGAGGGGU | 7822 | GUGUAGGUUUCUCCUUUAGGU |
| 5219 | UCUGUGGUGAGGGGAGGGGUG | 7823 | UGUAGGUUUCUCCUUUAGGUG |
| 5220 | CUGUGGUGAGGGGAGGGGUGC | 7824 | GUAGGUUUCUCCUUUAGGUGG |
| 5221 | UGUGGUGAGGGGAGGGGUGCC | 7825 | UAGGUUUCUCCUUUAGGUGGU |
| 5222 | GUGGUGAGGGGAGGGGUGCCA | 7826 | AGGUUUCUCCUUUAGGUGGUU |
| 5223 | UGGUGAGGGGAGGGGUGCCAC | 7827 | GGUUUCUCCUUUAGGUGGUUC |
| 5224 | GGUGAGGGGAGGGGUGCCACU | 7828 | GUUUCUCCUUUAGGUGGUUCU |
| 5225 | GUGAGGGGAGGGGUGCCACUU | 7829 | UUUCUCCUUUAGGUGGUUCUU |
| 5226 | UGAGGGGAGGGGUGCCACUUC | 7830 | UUCUCCUUUAGGUGGUUCUUG |
| 5227 | GAGGGGAGGGGUGCCACUUCC | 7831 | UCUCCUUUAGGUGGUUCUUGG |
| 5228 | AGGGGAGGGGUGCCACUUCCU | 7832 | CUCCUUUAGGUGGUUCUUGGA |
| 5229 | GGGGAGGGGUGCCACUUCCUC | 7833 | UCCUUUAGGUGGUUCUUGGAG |
| 5230 | GGGAGGGGUGCCACUUCCUCU | 7834 | CCUUUAGGUGGUUCUUGGAGA |
| 5231 | GGAGGGGUGCCACUUCCUCUU | 7835 | CUUUAGGUGGUUCUUGGAGAA |
| 5232 | GAGGGGUGCCACUUCCUCUUU | 7836 | UUUAGGUGGUUCUUGGAGAAC |
| 5233 | AGGGGUGCCACUUCCUCUUUG | 7837 | UUAGGUGGUUCUUGGAGAACA |
| 5234 | GGGGUGCCACUUCCUCUUUGC | 7838 | UAGGUGGUUCUUGGAGAACAU |
| 5235 | GGGUGCCACUUCCUCUUUGCC | 7839 | AGGUGGUUCUUGGAGAACAUA |
| 5236 | GGUGCCACUUCCUCUUUGCCC | 7840 | GGUGGUUCUUGGAGAACAUAU |
| 5237 | GUGCCACUUCCUCUUUGCCCA | 7841 | GUGGUUCUUGGAGAACAUAUG |
| 5238 | UGCCACUUCCUCUUUGCCCAG | 7842 | UGGUUCUUGGAGAACAUAUGC |
| 5239 | GCCACUUCCUCUUUGCCCAGC | 7843 | GGUUCUUGGAGAACAUAUGCA |
| 5240 | CCACUUCCUCUUUGCCCAGCG | 7844 | GUUCUUGGAGAACAUAUGCAU |
| 5241 | CACUUCCUCUUUGCCCAGCGA | 7845 | UUCUUGGAGAACAUAUGCAUU |
| 5242 | ACUUCCUCUUUGCCCAGCGAG | 7846 | UCUUGGAGAACAUAUGCAUUU |
| 5243 | CUUCCUCUUUGCCCAGCGAGA | 7847 | CUUGGAGAACAUAUGCAUUUA |
| 5244 | UUCCUCUUUGCCCAGCGAGAG | 7848 | UUGGAGAACAUAUGCAUUUAA |
| 5245 | UCCUCUUUGCCCAGCGAGAGG | 7849 | UGGAGAACAUAUGCAUUUAAU |
| 5246 | CCUCUUUGCCCAGCGAGAGGG | 7850 | GGAGAACAUAUGCAUUUAAUU |
| 5247 | CUCUUUGCCCAGCGAGAGGGC | 7851 | GAGAACAUAUGCAUUUAAUUG |
| 5248 | UCUUUGCCCAGCGAGAGGGCG | 7852 | AGAACAUAUGCAUUUAAUUGA |
| 5249 | CUUUGCCCAGCGAGAGGGCGU | 7853 | GAACAUAUGCAUUUAAUUGAA |
| 5250 | UUUGCCCAGCGAGAGGGCGUA | 7854 | AACAUAUGCAUUUAAUUGAAC |
| 5251 | UUGCCCAGCGAGAGGGCGUAC | 7855 | ACAUAUGCAUUUAAUUGAACU |
| 5252 | UGCCCAGCGAGAGGGCGUACU | 7856 | CAUAUGCAUUUAAUUGAACUU |
| 5253 | GCCCAGCGAGAGGGCGUACUC | 7857 | AUAUGCAUUUAAUUGAACUUC |
| 5254 | CCCAGCGAGAGGGCGUACUCU | 7858 | UAUGCAUUUAAUUGAACUUCA |
| 5255 | CCAGCGAGAGGGCGUACUCUA | 7859 | AUGCAUUUAAUUGAACUUCAU |
| 5256 | CAGCGAGAGGGCGUACUCUAC | 7860 | UGCAUUUAAUUGAACUUCAUU |
| 5257 | AGCGAGAGGGCGUACUCUACC | 7861 | GCAUUUAAUUGAACUUCAUUC |
| 5258 | GCGAGAGGGCGUACUCUACCC | 7862 | CAUUUAAUUGAACUUCAUUCU |
| 5259 | CGAGAGGGCGUACUCUACCCC | 7863 | AUUUAAUUGAACUUCAUUCUU |
| 5260 | GAGAGGGCGUACUCUACCCCA | 7864 | UUUAAUUGAACUUCAUUCUUA |
| 5261 | AGAGGGCGUACUCUACCCCAG | 7865 | UUAAUUGAACUUCAUUCUUAG |
| 5262 | GAGGGCGUACUCUACCCCAGA | 7866 | UAAUUGAACUUCAUUCUUAGG |
| 5263 | AGGGCGUACUCUACCCCAGAG | 7867 | AAUUGAACUUCAUUCUUAGGC |
| 5264 | GGGCGUACUCUACCCCAGAGA | 7868 | AUUGAACUUCAUUCUUAGGCA |
| 5265 | GGCGUACUCUACCCCAGAGAG | 7869 | UUGAACUUCAUUCUUAGGCAG |
| 5266 | GCGUACUCUACCCCAGAGAGG | 7870 | UGAACUUCAUUCUUAGGCAGG |
| 5267 | CGUACUCUACCCCAGAGAGGG | 7871 | GAACUUCAUUCUUAGGCAGGG |
| 5268 | GUACUCUACCCCAGAGAGGGA | 7872 | AACUUCAUUCUUAGGCAGGGU |
| 5269 | UACUCUACCCCAGAGAGGGAA | 7873 | ACUUCAUUCUUAGGCAGGGUU |
| 5270 | ACUCUACCCCAGAGAGGGAAA | 7874 | CUUCAUUCUUAGGCAGGGUUA |
| 5271 | CUCUACCCCAGAGAGGGAAAC | 7875 | UUCAUUCUUAGGCAGGGUUAU |
| 5272 | UCUACCCCAGAGAGGGAAACA | 7876 | UCAUUCUUAGGCAGGGUUAUC |
| 5273 | CUACCCCAGAGAGGGAAACAC | 7877 | CAUUCUUAGGCAGGGUUAUCU |
| 5274 | UACCCCAGAGAGGGAAACACC | 7878 | AUUCUUAGGCAGGGUUAUCUG |
| 5275 | ACCCCAGAGAGGGAAACACCA | 7879 | UUCUUAGGCAGGGUUAUCUGG |
| 5276 | CCCCAGAGAGGGAAACACCAU | 7880 | UCUUAGGCAGGGUUAUCUGGA |
| 5277 | CCCAGAGAGGGAAACACCAUG | 7881 | CUUAGGCAGGGUUAUCUGGAC |
| 5278 | CCAGAGAGGGAAACACCAUGC | 7882 | UUAGGCAGGGUUAUCUGGACA |
| 5279 | CAGAGAGGGAAACACCAUGCC | 7883 | UAGGCAGGGUUAUCUGGACAC |
| 5280 | AGAGAGGGAAACACCAUGCCC | 7884 | AGGCAGGGUUAUCUGGACACU |
| 5281 | GAGAGGGAAACACCAUGCCCA | 7885 | GGCAGGGUUAUCUGGACACUC |
| 5282 | AGAGGGAAACACCAUGCCCAC | 7886 | GCAGGGUUAUCUGGACACUCU |
| 5283 | GAGGGAAACACCAUGCCCACA | 7887 | CAGGGUUAUCUGGACACUCUC |
| 5284 | AGGGAAACACCAUGCCCACAG | 7888 | AGGGUUAUCUGGACACUCUCU |
| 5285 | GGGAAACACCAUGCCCACAGU | 7889 | GGGUUAUCUGGACACUCUCUC |
| 5286 | GGAAACACCAUGCCCACAGUG | 7890 | GGUUAUCUGGACACUCUCUCC |
| 5287 | GAAACACCAUGCCCACAGUGC | 7891 | GUUAUCUGGACACUCUCUCCA |
| 5288 | AAACACCAUGCCCACAGUGCU | 7892 | UUAUCUGGACACUCUCUCCAG |
| 5289 | AACACCAUGCCCACAGUGCUU | 7893 | UAUCUGGACACUCUCUCCAGC |
| 5290 | ACACCAUGCCCACAGUGCUUG | 7894 | AUCUGGACACUCUCUCCAGCA |
| 5291 | CACCAUGCCCACAGUGCUUGG | 7895 | UCUGGACACUCUCUCCAGCAG |
| 5292 | ACCAUGCCCACAGUGCUUGGU | 7896 | CUGGACACUCUCUCCAGCAGA |
| 5293 | CCAUGCCCACAGUGCUUGGUU | 7897 | UGGACACUCUCUCCAGCAGAU |
| 5294 | CAUGCCCACAGUGCUUGGUUU | 7898 | GGACACUCUCUCCAGCAGAUA |
| 5295 | AUGCCCACAGUGCUUGGUUUU | 7899 | GACACUCUCUCCAGCAGAUAC |
| 5296 | UGCCCACAGUGCUUGGUUUUG | 7900 | ACACUCUCUCCAGCAGAUACC |
| 5297 | GCCCACAGUGCUUGGUUUUGC | 7901 | CACUCUCUCCAGCAGAUACCA |
| 5298 | CCCACAGUGCUUGGUUUUGCA | 7902 | ACUCUCUCCAGCAGAUACCAC |
| 5299 | CCACAGUGCUUGGUUUUGCAC | 7903 | CUCUCUCCAGCAGAUACCACC |
| 5300 | CACAGUGCUUGGUUUUGCACU | 7904 | UCUCUCCAGCAGAUACCACCA |
| 5301 | ACAGUGCUUGGUUUUGCACUC | 7905 | CUCUCCAGCAGAUACCACCAG |
| 5302 | CAGUGCUUGGUUUUGCACUCA | 7906 | UCUCCAGCAGAUACCACCAGU |
| 5303 | AGUGCUUGGUUUUGCACUCAG | 7907 | CUCCAGCAGAUACCACCAGUU |
| 5304 | GUGCUUGGUUUUGCACUCAGG | 7908 | UCCAGCAGAUACCACCAGUUC |
| 5305 | UGCUUGGUUUUGCACUCAGGU | 7909 | CCAGCAGAUACCACCAGUUCC |
| 5306 | GCUUGGUUUUGCACUCAGGUG | 7910 | CAGCAGAUACCACCAGUUCCU |
| 5307 | CUUGGUUUUGCACUCAGGUGU | 7911 | AGCAGAUACCACCAGUUCCUU |
| 5308 | UUGGUUUUGCACUCAGGUGUG | 7912 | GCAGAUACCACCAGUUCCUUU |
| 5309 | UGGUUUUGCACUCAGGUGUGC | 7913 | CAGAUACCACCAGUUCCUUUA |
| 5310 | GGUUUUGCACUCAGGUGUGCG | 7914 | AGAUACCACCAGUUCCUUUAU |
| 5311 | GUUUUGCACUCAGGUGUGCGG | 7915 | GAUACCACCAGUUCCUUUAUA |
| 5312 | UUUUGCACUCAGGUGUGCGGG | 7916 | AUACCACCAGUUCCUUUAUAA |
| 5313 | UUUGCACUCAGGUGUGCGGGC | 7917 | UACCACCAGUUCCUUUAUAAC |
| 5314 | UUGCACUCAGGUGUGCGGGCA | 7918 | ACCACCAGUUCCUUUAUAACU |
| 5315 | UGCACUCAGGUGUGCGGGCAG | 7919 | CCACCAGUUCCUUUAUAACUG |
| 5316 | GCACUCAGGUGUGCGGGCAGC | 7920 | CACCAGUUCCUUUAUAACUGG |
| 5317 | CACUCAGGUGUGCGGGCAGCA | 7921 | ACCAGUUCCUUUAUAACUGGG |
| 5318 | ACUCAGGUGUGCGGGCAGCAC | 7922 | CCAGUUCCUUUAUAACUGGGU |
| 5319 | CUCAGGUGUGCGGGCAGCACA | 7923 | CAGUUCCUUUAUAACUGGGUA |
| 5320 | UCAGGUGUGCGGGCAGCACAG | 7924 | AGUUCCUUUAUAACUGGGUAU |
| 5321 | CAGGUGUGCGGGCAGCACAGC | 7925 | GUUCCUUUAUAACUGGGUAUG |
| 5322 | AGGUGUGCGGGCAGCACAGCA | 7926 | UUCCUUUAUAACUGGGUAUGG |
| 5323 | GGUGUGCGGGCAGCACAGCAG | 7927 | UCCUUUAUAACUGGGUAUGGU |
| 5324 | GUGUGCGGGCAGCACAGCAGG | 7928 | CCUUUAUAACUGGGUAUGGUG |
| 5325 | UGUGCGGGCAGCACAGCAGGC | 7929 | CUUUAUAACUGGGUAUGGUGC |
| 5326 | GUGCGGGCAGCACAGCAGGCC | 7930 | UUUAUAACUGGGUAUGGUGCU |
| 5327 | UGCGGGCAGCACAGCAGGCCU | 7931 | UUAUAACUGGGUAUGGUGCUG |
| 5328 | GCGGGCAGCACAGCAGGCCUC | 7932 | UAUAACUGGGUAUGGUGCUGA |
| 5329 | CGGGCAGCACAGCAGGCCUCA | 7933 | AUAACUGGGUAUGGUGCUGAG |
| 5330 | GGGCAGCACAGCAGGCCUCAC | 7934 | UAACUGGGUAUGGUGCUGAGG |
| 5331 | GGCAGCACAGCAGGCCUCACC | 7935 | AACUGGGUAUGGUGCUGAGGU |
| 5332 | GCAGCACAGCAGGCCUCACCU | 7936 | ACUGGGUAUGGUGCUGAGGUG |
| 5333 | CAGCACAGCAGGCCUCACCUU | 7937 | CUGGGUAUGGUGCUGAGGUGC |
| 5334 | AGCACAGCAGGCCUCACCUUG | 7938 | UGGGUAUGGUGCUGAGGUGCU |
| 5335 | GCACAGCAGGCCUCACCUUGC | 7939 | GGGUAUGGUGCUGAGGUGCUC |
| 5336 | CACAGCAGGCCUCACCUUGCA | 7940 | GGUAUGGUGCUGAGGUGCUCU |
| 5337 | ACAGCAGGCCUCACCUUGCAG | 7941 | GUAUGGUGCUGAGGUGCUCUG |
| 5338 | CAGCAGGCCUCACCUUGCAGC | 7942 | UAUGGUGCUGAGGUGCUCUGG |
| 5339 | AGCAGGCCUCACCUUGCAGCA | 7943 | AUGGUGCUGAGGUGCUCUGGA |
| 5340 | GCAGGCCUCACCUUGCAGCAC | 7944 | UGGUGCUGAGGUGCUCUGGAA |
| 5341 | CAGGCCUCACCUUGCAGCACU | 7945 | GGUGCUGAGGUGCUCUGGAAA |
| 5342 | AGGCCUCACCUUGCAGCACUC | 7946 | GUGCUGAGGUGCUCUGGAAAG |
| 5343 | GGCCUCACCUUGCAGCACUCU | 7947 | UGCUGAGGUGCUCUGGAAAGA |
| 5344 | GCCUCACCUUGCAGCACUCUG | 7948 | GCUGAGGUGCUCUGGAAAGAG |
| 5345 | CCUCACCUUGCAGCACUCUGG | 7949 | CUGAGGUGCUCUGGAAAGAGG |
| 5346 | CUCACCUUGCAGCACUCUGGG | 7950 | UGAGGUGCUCUGGAAAGAGGC |
| 5347 | UCACCUUGCAGCACUCUGGGC | 7951 | GAGGUGCUCUGGAAAGAGGCC |
| 5348 | CACCUUGCAGCACUCUGGGCA | 7952 | AGGUGCUCUGGAAAGAGGCCU |
| 5349 | ACCUUGCAGCACUCUGGGCAC | 7953 | GGUGCUCUGGAAAGAGGCCUG |
| 5350 | CCUUGCAGCACUCUGGGCACA | 7954 | GUGCUCUGGAAAGAGGCCUGG |
| 5351 | CUUGCAGCACUCUGGGCACAA | 7955 | UGCUCUGGAAAGAGGCCUGGG |
| 5352 | UUGCAGCACUCUGGGCACAAU | 7956 | GCUCUGGAAAGAGGCCUGGGG |
| 5353 | UGCAGCACUCUGGGCACAAUG | 7957 | CUCUGGAAAGAGGCCUGGGGG |
| 5354 | GCAGCACUCUGGGCACAAUGA | 7958 | UCUGGAAAGAGGCCUGGGGGG |
| 5355 | CAGCACUCUGGGCACAAUGAC | 7959 | CUGGAAAGAGGCCUGGGGGGU |
| 5356 | AGCACUCUGGGCACAAUGACA | 7960 | UGGAAAGAGGCCUGGGGGGUA |
| 5357 | GCACUCUGGGCACAAUGACAC | 7961 | GGAAAGAGGCCUGGGGGGUAG |
| 5358 | CACUCUGGGCACAAUGACACU | 7962 | GAAAGAGGCCUGGGGGGUAGG |
| 5359 | ACUCUGGGCACAAUGACACUG | 7963 | AAAGAGGCCUGGGGGGUAGGG |
| 5360 | CUCUGGGCACAAUGACACUGU | 7964 | AAGAGGCCUGGGGGGUAGGGG |
| 5361 | UCUGGGCACAAUGACACUGUC | 7965 | AGAGGCCUGGGGGGUAGGGGU |
| 5362 | CUGGGCACAAUGACACUGUCC | 7966 | GAGGCCUGGGGGGUAGGGGUA |
| 5363 | UGGGCACAAUGACACUGUCCA | 7967 | AGGCCUGGGGGGUAGGGGUAG |
| 5364 | GGGCACAAUGACACUGUCCAC | 7968 | GGCCUGGGGGGUAGGGGUAGC |
| 5365 | GGCACAAUGACACUGUCCACU | 7969 | GCCUGGGGGGUAGGGGUAGCA |
| 5366 | GCACAAUGACACUGUCCACUG | 7970 | CCUGGGGGGUAGGGGUAGCAU |
| 5367 | CACAAUGACACUGUCCACUGG | 7971 | CUGGGGGGUAGGGGUAGCAUA |
| 5368 | ACAAUGACACUGUCCACUGGG | 7972 | UGGGGGGUAGGGGUAGCAUAA |
| 5369 | CAAUGACACUGUCCACUGGGG | 7973 | GGGGGGUAGGGGUAGCAUAAC |
| 5370 | AAUGACACUGUCCACUGGGGA | 7974 | GGGGGUAGGGGUAGCAUAACU |
| 5371 | AUGACACUGUCCACUGGGGAG | 7975 | GGGGUAGGGGUAGCAUAACUG |
| 5372 | UGACACUGUCCACUGGGGAGC | 7976 | GGGUAGGGGUAGCAUAACUGU |
| 5373 | GACACUGUCCACUGGGGAGCU | 7977 | GGUAGGGGUAGCAUAACUGUA |
| 5374 | ACACUGUCCACUGGGGAGCUG | 7978 | GUAGGGGUAGCAUAACUGUAG |
| 5375 | CACUGUCCACUGGGGAGCUGC | 7979 | UAGGGGUAGCAUAACUGUAGG |
| 5376 | ACUGUCCACUGGGGAGCUGCA | 7980 | AGGGGUAGCAUAACUGUAGGA |
| 5377 | CUGUCCACUGGGGAGCUGCAG | 7981 | GGGGUAGCAUAACUGUAGGAG |
| 5378 | UGUCCACUGGGGAGCUGCAGA | 7982 | GGGUAGCAUAACUGUAGGAGG |
| 5379 | GUCCACUGGGGAGCUGCAGAG | 7983 | GGUAGCAUAACUGUAGGAGGG |
| 5380 | UCCACUGGGGAGCUGCAGAGC | 7984 | GUAGCAUAACUGUAGGAGGGA |
| 5381 | CCACUGGGGAGCUGCAGAGCU | 7985 | UAGCAUAACUGUAGGAGGGAG |
| 5382 | CACUGGGGAGCUGCAGAGCUU | 7986 | AGCAUAACUGUAGGAGGGAGC |
| 5383 | ACUGGGGAGCUGCAGAGCUUA | 7987 | GCAUAACUGUAGGAGGGAGCC |
| 5384 | CUGGGGAGCUGCAGAGCUUAG | 7988 | CAUAACUGUAGGAGGGAGCCA |
| 5385 | UGGGGAGCUGCAGAGCUUAGC | 7989 | AUAACUGUAGGAGGGAGCCAC |
| 5386 | GGGGAGCUGCAGAGCUUAGCA | 7990 | UAACUGUAGGAGGGAGCCACU |
| 5387 | GGGAGCUGCAGAGCUUAGCAG | 7991 | AACUGUAGGAGGGAGCCACUG |
| 5388 | GGAGCUGCAGAGCUUAGCAGC | 7992 | ACUGUAGGAGGGAGCCACUGG |
| 5389 | GAGCUGCAGAGCUUAGCAGCU | 7993 | CUGUAGGAGGGAGCCACUGGC |
| 5390 | AGCUGCAGAGCUUAGCAGCUG | 7994 | UGUAGGAGGGAGCCACUGGCU |
| 5391 | GCUGCAGAGCUUAGCAGCUGG | 7995 | GUAGGAGGGAGCCACUGGCUG |
| 5392 | CUGCAGAGCUUAGCAGCUGGC | 7996 | UAGGAGGGAGCCACUGGCUGG |
| 5393 | UGCAGAGCUUAGCAGCUGGCU | 7997 | AGGAGGGAGCCACUGGCUGGG |
| 5394 | GCAGAGCUUAGCAGCUGGCUG | 7998 | GGAGGGAGCCACUGGCUGGGG |
| 5395 | CAGAGCUUAGCAGCUGGCUGG | 7999 | GAGGGAGCCACUGGCUGGGGG |
| 5396 | AGAGCUUAGCAGCUGGCUGGG | 8000 | AGGGAGCCACUGGCUGGGGGA |
| 5397 | GAGCUUAGCAGCUGGCUGGGU | 8001 | GGGAGCCACUGGCUGGGGGAC |
| 5398 | AGCUUAGCAGCUGGCUGGGUC | 8002 | GGAGCCACUGGCUGGGGGACA |
| 5399 | GCUUAGCAGCUGGCUGGGUCU | 8003 | GAGCCACUGGCUGGGGGACAG |
| 5400 | CUUAGCAGCUGGCUGGGUCUG | 8004 | AGCCACUGGCUGGGGGACAGC |
| 5401 | UUAGCAGCUGGCUGGGUCUGC | 8005 | GCCACUGGCUGGGGGACAGCA |
| 5402 | UAGCAGCUGGCUGGGUCUGCC | 8006 | CCACUGGCUGGGGGACAGCAA |
| 5403 | AGCAGCUGGCUGGGUCUGCCC | 8007 | CACUGGCUGGGGGACAGCAAU |
| 5404 | GCAGCUGGCUGGGUCUGCCCU | 8008 | ACUGGCUGGGGGACAGCAAUC |
| 5405 | CAGCUGGCUGGGUCUGCCCUC | 8009 | CUGGCUGGGGGACAGCAAUCU |
| 5406 | AGCUGGCUGGGUCUGCCCUCG | 8010 | UGGCUGGGGGACAGCAAUCUG |
| 5407 | GCUGGCUGGGUCUGCCCUCGG | 8011 | GGCUGGGGGACAGCAAUCUGG |
| 5408 | CUGGCUGGGUCUGCCCUCGGG | 8012 | GCUGGGGGACAGCAAUCUGGG |
| 5409 | UGGCUGGGUCUGCCCUCGGGG | 8013 | CUGGGGGACAGCAAUCUGGGU |
| 5410 | GGCUGGGUCUGCCCUCGGGGG | 8014 | UGGGGGACAGCAAUCUGGGUU |
| 5411 | GCUGGGUCUGCCCUCGGGGGA | 8015 | GGGGGACAGCAAUCUGGGUUU |
| 5412 | CUGGGUCUGCCCUCGGGGGAG | 8016 | GGGGACAGCAAUCUGGGUUUU |
| 5413 | UGGGUCUGCCCUCGGGGGAGG | 8017 | GGGACAGCAAUCUGGGUUUUC |
| 5414 | GGGUCUGCCCUCGGGGGAGGG | 8018 | GGACAGCAAUCUGGGUUUUCU |
| 5415 | GGUCUGCCCUCGGGGGAGGGG | 8019 | GACAGCAAUCUGGGUUUUCUC |
| 5416 | GUCUGCCCUCGGGGGAGGGGA | 8020 | ACAGCAAUCUGGGUUUUCUCA |
| 5417 | UCUGCCCUCGGGGGAGGGGAG | 8021 | CAGCAAUCUGGGUUUUCUCAG |
| 5418 | CUGCCCUCGGGGGAGGGGAGG | 8022 | AGCAAUCUGGGUUUUCUCAGA |
| 5419 | UGCCCUCGGGGGAGGGGAGGA | 8023 | GCAAUCUGGGUUUUCUCAGAA |
| 5420 | GCCCUCGGGGGAGGGGAGGAG | 8024 | CAAUCUGGGUUUUCUCAGAAC |
| 5421 | CCCUCGGGGGAGGGGAGGAGU | 8025 | AAUCUGGGUUUUCUCAGAACU |
| 5422 | CCUCGGGGGAGGGGAGGAGUU | 8026 | AUCUGGGUUUUCUCAGAACUU |
| 5423 | CUCGGGGGAGGGGAGGAGUUU | 8027 | UCUGGGUUUUCUCAGAACUUU |
| 5424 | UCGGGGGAGGGGAGGAGUUUG | 8028 | CUGGGUUUUCUCAGAACUUUU |
| 5425 | CGGGGGAGGGGAGGAGUUUGC | 8029 | UGGGUUUUCUCAGAACUUUUU |
| 5426 | GGGGGAGGGGAGGAGUUUGCA | 8030 | GGGUUUUCUCAGAACUUUUUA |
| 5427 | GGGGAGGGGAGGAGUUUGCAA | 8031 | GGUUUUCUCAGAACUUUUUAC |
| 5428 | GGGAGGGGAGGAGUUUGCAAA | 8032 | GUUUUCUCAGAACUUUUUACU |
| 5429 | GGAGGGGAGGAGUUUGCAAAA | 8033 | UUUUCUCAGAACUUUUUACUU |
| 5430 | GAGGGGAGGAGUUUGCAAAAA | 8034 | UUUCUCAGAACUUUUUACUUG |
| 5431 | AGGGGAGGAGUUUGCAAAAAA | 8035 | UUCUCAGAACUUUUUACUUGU |
| 5432 | GGGGAGGAGUUUGCAAAAAAA | 8036 | UCUCAGAACUUUUUACUUGUU |
| 5433 | GGGAGGAGUUUGCAAAAAAAG | 8037 | CUCAGAACUUUUUACUUGUUG |
| 5434 | GGAGGAGUUUGCAAAAAAAGG | 8038 | UCAGAACUUUUUACUUGUUGA |
| 5435 | GAGGAGUUUGCAAAAAAAGGA | 8039 | CAGAACUUUUUACUUGUUGAG |
| 5436 | AGGAGUUUGCAAAAAAAGGAG | 8040 | AGAACUUUUUACUUGUUGAGU |
| 5437 | GGAGUUUGCAAAAAAAGGAGG | 8041 | GAACUUUUUACUUGUUGAGUG |
| 5438 | GAGUUUGCAAAAAAAGGAGGC | 8042 | AACUUUUUACUUGUUGAGUGC |
| 5439 | AGUUUGCAAAAAAAGGAGGCC | 8043 | ACUUUUUACUUGUUGAGUGCU |
| 5440 | GUUUGCAAAAAAAGGAGGCCC | 8044 | CUUUUUACUUGUUGAGUGCUG |
| 5441 | UUUGCAAAAAAAGGAGGCCCU | 8045 | UUUUUACUUGUUGAGUGCUGG |
| 5442 | UUGCAAAAAAAGGAGGCCCUG | 8046 | UUUUACUUGUUGAGUGCUGGG |
| 5443 | UGCAAAAAAAGGAGGCCCUGA | 8047 | UUUACUUGUUGAGUGCUGGGC |
| 5444 | GCAAAAAAAGGAGGCCCUGAG | 8048 | UUACUUGUUGAGUGCUGGGCG |
| 5445 | CAAAAAAAGGAGGCCCUGAGG | 8049 | UACUUGUUGAGUGCUGGGCGU |
| 5446 | AAAAAAAGGAGGCCCUGAGGU | 8050 | ACUUGUUGAGUGCUGGGCGUA |
| 5447 | AAAAAAGGAGGCCCUGAGGUG | 8051 | CUUGUUGAGUGCUGGGCGUAG |
| 5448 | AAAAAGGAGGCCCUGAGGUGA | 8052 | UUGUUGAGUGCUGGGCGUAGU |
| 5449 | AAAAGGAGGCCCUGAGGUGAG | 8053 | UGUUGAGUGCUGGGCGUAGUA |
| 5450 | AAAGGAGGCCCUGAGGUGAGG | 8054 | GUUGAGUGCUGGGCGUAGUAG |
| 5451 | AAGGAGGCCCUGAGGUGAGGA | 8055 | UUGAGUGCUGGGCGUAGUAGC |
| 5452 | AGGAGGCCCUGAGGUGAGGAU | 8056 | UGAGUGCUGGGCGUAGUAGCA |
| 5453 | GGAGGCCCUGAGGUGAGGAUA | 8057 | GAGUGCUGGGCGUAGUAGCAA |
| 5454 | GAGGCCCUGAGGUGAGGAUAU | 8058 | AGUGCUGGGCGUAGUAGCAAG |
| 5455 | AGGCCCUGAGGUGAGGAUAUC | 8059 | GUGCUGGGCGUAGUAGCAAGA |
| 5456 | GGCCCUGAGGUGAGGAUAUCU | 8060 | UGCUGGGCGUAGUAGCAAGAC |
| 5457 | GCCCUGAGGUGAGGAUAUCUG | 8061 | GCUGGGCGUAGUAGCAAGACC |
| 5458 | CCCUGAGGUGAGGAUAUCUGG | 8062 | CUGGGCGUAGUAGCAAGACCC |
| 5459 | CCUGAGGUGAGGAUAUCUGGG | 8063 | UGGGCGUAGUAGCAAGACCCU |
| 5460 | CUGAGGUGAGGAUAUCUGGGG | 8064 | GGGCGUAGUAGCAAGACCCUC |
| 5461 | UGAGGUGAGGAUAUCUGGGGG | 8065 | GGCGUAGUAGCAAGACCCUCU |
| 5462 | GAGGUGAGGAUAUCUGGGGGC | 8066 | GCGUAGUAGCAAGACCCUCUG |
| 5463 | AGGUGAGGAUAUCUGGGGGCC | 8067 | CGUAGUAGCAAGACCCUCUGA |
| 5464 | GGUGAGGAUAUCUGGGGGCCC | 8068 | GUAGUAGCAAGACCCUCUGAU |
| 5465 | GUGAGGAUAUCUGGGGGCCCA | 8069 | UAGUAGCAAGACCCUCUGAUA |
| 5466 | UGAGGAUAUCUGGGGGCCCAC | 8070 | AGUAGCAAGACCCUCUGAUAU |
| 5467 | GAGGAUAUCUGGGGGCCCACC | 8071 | GUAGCAAGACCCUCUGAUAUU |
| 5468 | AGGAUAUCUGGGGGCCCACCA | 8072 | UAGCAAGACCCUCUGAUAUUU |
| 5469 | GGAUAUCUGGGGGCCCACCAG | 8073 | AGCAAGACCCUCUGAUAUUUC |
| 5470 | GAUAUCUGGGGGCCCACCAGA | 8074 | GCAAGACCCUCUGAUAUUUCA |
| 5471 | AUAUCUGGGGGCCCACCAGAC | 8075 | CAAGACCCUCUGAUAUUUCAG |
| 5472 | UAUCUGGGGGCCCACCAGACA | 8076 | AAGACCCUCUGAUAUUUCAGG |
| 5473 | AUCUGGGGGCCCACCAGACAG | 8077 | AGACCCUCUGAUAUUUCAGGU |
| 5474 | UCUGGGGGCCCACCAGACAGG | 8078 | GACCCUCUGAUAUUUCAGGUU |
| 5475 | CUGGGGGCCCACCAGACAGGU | 8079 | ACCCUCUGAUAUUUCAGGUUG |
| 5476 | UGGGGGCCCACCAGACAGGUU | 8080 | CCCUCUGAUAUUUCAGGUUGC |
| 5477 | GGGGGCCCACCAGACAGGUUU | 8081 | CCUCUGAUAUUUCAGGUUGCA |
| 5478 | GGGGCCCACCAGACAGGUUUA | 8082 | CUCUGAUAUUUCAGGUUGCAC |
| 5479 | GGGCCCACCAGACAGGUUUAA | 8083 | UCUGAUAUUUCAGGUUGCACU |
| 5480 | GGCCCACCAGACAGGUUUAAA | 8084 | CUGAUAUUUCAGGUUGCACUG |
| 5481 | GCCCACCAGACAGGUUUAAAG | 8085 | UGAUAUUUCAGGUUGCACUGA |
| 5482 | CCCACCAGACAGGUUUAAAGA | 8086 | GAUAUUUCAGGUUGCACUGAU |
| 5483 | CCACCAGACAGGUUUAAAGAG | 8087 | AUAUUUCAGGUUGCACUGAUA |
| 5484 | CACCAGACAGGUUUAAAGAGG | 8088 | UAUUUCAGGUUGCACUGAUAC |
| 5485 | ACCAGACAGGUUUAAAGAGGA | 8089 | AUUUCAGGUUGCACUGAUACA |
| 5486 | CCAGACAGGUUUAAAGAGGAA | 8090 | UUUCAGGUUGCACUGAUACAU |
| 5487 | CAGACAGGUUUAAAGAGGAAA | 8091 | UUCAGGUUGCACUGAUACAUU |
| 5488 | AGACAGGUUUAAAGAGGAAAC | 8092 | UCAGGUUGCACUGAUACAUUC |
| 5489 | GACAGGUUUAAAGAGGAAACC | 8093 | CAGGUUGCACUGAUACAUUCU |
| 5490 | ACAGGUUUAAAGAGGAAACCU | 8094 | AGGUUGCACUGAUACAUUCUU |
| 5491 | CAGGUUUAAAGAGGAAACCUC | 8095 | GGUUGCACUGAUACAUUCUUU |
| 5492 | AGGUUUAAAGAGGAAACCUCU | 8096 | GUUGCACUGAUACAUUCUUUG |
| 5493 | GGUUUAAAGAGGAAACCUCUU | 8097 | UUGCACUGAUACAUUCUUUGG |
| 5494 | GUUUAAAGAGGAAACCUCUUC | 8098 | UGCACUGAUACAUUCUUUGGC |
| 5495 | UUUAAAGAGGAAACCUCUUCA | 8099 | GCACUGAUACAUUCUUUGGCC |
| 5496 | UUAAAGAGGAAACCUCUUCAU | 8100 | CACUGAUACAUUCUUUGGCCC |
| 5497 | UAAAGAGGAAACCUCUUCAUU | 8101 | ACUGAUACAUUCUUUGGCCCA |
| 5498 | AAAGAGGAAACCUCUUCAUUC | 8102 | CUGAUACAUUCUUUGGCCCAC |
| 5499 | AAGAGGAAACCUCUUCAUUCA | 8103 | UGAUACAUUCUUUGGCCCACC |
| 5500 | AGAGGAAACCUCUUCAUUCAC | 8104 | GAUACAUUCUUUGGCCCACCA |
| 5501 | GAGGAAACCUCUUCAUUCACA | 8105 | AUACAUUCUUUGGCCCACCAG |
| 5502 | AGGAAACCUCUUCAUUCACAG | 8106 | UACAUUCUUUGGCCCACCAGA |
| 5503 | GGAAACCUCUUCAUUCACAGC | 8107 | ACAUUCUUUGGCCCACCAGAC |
| 5504 | GAAACCUCUUCAUUCACAGCU | 8108 | CAUUCUUUGGCCCACCAGACA |
| 5505 | AAACCUCUUCAUUCACAGCUU | 8109 | AUUCUUUGGCCCACCAGACAG |
| 5506 | AACCUCUUCAUUCACAGCUUC | 8110 | UUCUUUGGCCCACCAGACAGC |
| 5507 | ACCUCUUCAUUCACAGCUUCG | 8111 | UCUUUGGCCCACCAGACAGCU |
| 5508 | CCUCUUCAUUCACAGCUUCGU | 8112 | CUUUGGCCCACCAGACAGCUC |
| 5509 | CUCUUCAUUCACAGCUUCGUU | 8113 | UUUGGCCCACCAGACAGCUCU |
| 5510 | UCUUCAUUCACAGCUUCGUUG | 8114 | UUGGCCCACCAGACAGCUCUG |
| 5511 | CUUCAUUCACAGCUUCGUUGA | 8115 | UGGCCCACCAGACAGCUCUGC |
| 5512 | UUCAUUCACAGCUUCGUUGAG | 8116 | GGCCCACCAGACAGCUCUGCA |
| 5513 | UCAUUCACAGCUUCGUUGAGG | 8117 | GCCCACCAGACAGCUCUGCAG |
| 5514 | CAUUCACAGCUUCGUUGAGGG | 8118 | CCCACCAGACAGCUCUGCAGU |
| 5515 | AUUCACAGCUUCGUUGAGGGG | 8119 | CCACCAGACAGCUCUGCAGUC |
| 5516 | UUCACAGCUUCGUUGAGGGGU | 8120 | CACCAGACAGCUCUGCAGUCA |
| 5517 | UCACAGCUUCGUUGAGGGGUU | 8121 | ACCAGACAGCUCUGCAGUCAG |
| 5518 | CACAGCUUCGUUGAGGGGUUC | 8122 | CCAGACAGCUCUGCAGUCAGG |
| 5519 | ACAGCUUCGUUGAGGGGUUCC | 8123 | CAGACAGCUCUGCAGUCAGGU |
| 5520 | CAGCUUCGUUGAGGGGUUCCU | 8124 | AGACAGCUCUGCAGUCAGGUC |
| 5521 | AGCUUCGUUGAGGGGUUCCUG | 8125 | GACAGCUCUGCAGUCAGGUCU |
| 5522 | GCUUCGUUGAGGGGUUCCUGG | 8126 | ACAGCUCUGCAGUCAGGUCUG |
| 5523 | CUUCGUUGAGGGGUUCCUGGA | 8127 | CAGCUCUGCAGUCAGGUCUGU |
| 5524 | UUCGUUGAGGGGUUCCUGGAG | 8128 | AGCUCUGCAGUCAGGUCUGUG |
| 5525 | UCGUUGAGGGGUUCCUGGAGG | 8129 | GCUCUGCAGUCAGGUCUGUGG |
| 5526 | CGUUGAGGGGUUCCUGGAGGA | 8130 | CUCUGCAGUCAGGUCUGUGGU |
| 5527 | GUUGAGGGGUUCCUGGAGGAC | 8131 | UCUGCAGUCAGGUCUGUGGUU |
| 5528 | UUGAGGGGUUCCUGGAGGACG | 8132 | CUGCAGUCAGGUCUGUGGUUA |
| 5529 | UGAGGGGUUCCUGGAGGACGU | 8133 | UGCAGUCAGGUCUGUGGUUAG |
| 5530 | GAGGGGUUCCUGGAGGACGUC | 8134 | GCAGUCAGGUCUGUGGUUAGG |
| 5531 | AGGGGUUCCUGGAGGACGUCU | 8135 | CAGUCAGGUCUGUGGUUAGGG |
| 5532 | GGGGUUCCUGGAGGACGUCUC | 8136 | AGUCAGGUCUGUGGUUAGGGG |
| 5533 | GGGUUCCUGGAGGACGUCUCU | 8137 | GUCAGGUCUGUGGUUAGGGGA |
| 5534 | GGUUCCUGGAGGACGUCUCUG | 8138 | UCAGGUCUGUGGUUAGGGGAC |
| 5535 | GUUCCUGGAGGACGUCUCUGG | 8139 | CAGGUCUGUGGUUAGGGGACU |
| 5536 | UUCCUGGAGGACGUCUCUGGA | 8140 | AGGUCUGUGGUUAGGGGACUG |
| 5537 | UCCUGGAGGACGUCUCUGGAU | 8141 | GGUCUGUGGUUAGGGGACUGG |
| 5538 | CCUGGAGGACGUCUCUGGAUU | 8142 | GUCUGUGGUUAGGGGACUGGA |
| 5539 | CUGGAGGACGUCUCUGGAUUC | 8143 | UCUGUGGUUAGGGGACUGGAA |
| 5540 | UGGAGGACGUCUCUGGAUUCA | 8144 | CUGUGGUUAGGGGACUGGAAA |
| 5541 | GGAGGACGUCUCUGGAUUCAA | 8145 | UGUGGUUAGGGGACUGGAAAU |
| 5542 | GAGGACGUCUCUGGAUUCAAG | 8146 | GUGGUUAGGGGACUGGAAAUU |
| 5543 | AGGACGUCUCUGGAUUCAAGU | 8147 | UGGUUAGGGGACUGGAAAUUG |
| 5544 | GGACGUCUCUGGAUUCAAGUC | 8148 | GGUUAGGGGACUGGAAAUUGU |
| 5545 | GACGUCUCUGGAUUCAAGUCC | 8149 | GUUAGGGGACUGGAAAUUGUA |
| 5546 | ACGUCUCUGGAUUCAAGUCCC | 8150 | UUAGGGGACUGGAAAUUGUAA |
| 5547 | CGUCUCUGGAUUCAAGUCCCA | 8151 | UAGGGGACUGGAAAUUGUAAU |
| 5548 | GUCUCUGGAUUCAAGUCCCAG | 8152 | AGGGGACUGGAAAUUGUAAUC |
| 5549 | UCUCUGGAUUCAAGUCCCAGG | 8153 | GGGGACUGGAAAUUGUAAUCG |
| 5550 | CUCUGGAUUCAAGUCCCAGGG | 8154 | GGGACUGGAAAUUGUAAUCGC |
| 5551 | UCUGGAUUCAAGUCCCAGGGG | 8155 | GGACUGGAAAUUGUAAUCGCC |
| 5552 | CUGGAUUCAAGUCCCAGGGGU | 8156 | GACUGGAAAUUGUAAUCGCCU |
| 5553 | UGGAUUCAAGUCCCAGGGGUU | 8157 | ACUGGAAAUUGUAAUCGCCUU |
| 5554 | GGAUUCAAGUCCCAGGGGUUC | 8158 | CUGGAAAUUGUAAUCGCCUUG |
| 5555 | GAUUCAAGUCCCAGGGGUUCU | 8159 | UGGAAAUUGUAAUCGCCUUGU |
| 5556 | AUUCAAGUCCCAGGGGUUCUG | 8160 | GGAAAUUGUAAUCGCCUUGUG |
| 5557 | UUCAAGUCCCAGGGGUUCUGG | 8161 | GAAAUUGUAAUCGCCUUGUGG |
| 5558 | UCAAGUCCCAGGGGUUCUGGU | 8162 | AAAUUGUAAUCGCCUUGUGGA |
| 5559 | CAAGUCCCAGGGGUUCUGGUU | 8163 | AAUUGUAAUCGCCUUGUGGAC |
| 5560 | AAGUCCCAGGGGUUCUGGUUG | 8164 | AUUGUAAUCGCCUUGUGGACC |
| 5561 | AGUCCCAGGGGUUCUGGUUGG | 8165 | UUGUAAUCGCCUUGUGGACCU |
| 5562 | GUCCCAGGGGUUCUGGUUGGG | 8166 | UGUAAUCGCCUUGUGGACCUC |
| 5563 | UCCCAGGGGUUCUGGUUGGGA | 8167 | GUAAUCGCCUUGUGGACCUCU |
| 5564 | CCCAGGGGUUCUGGUUGGGAC | 8168 | UAAUCGCCUUGUGGACCUCUG |
| 5565 | CCAGGGGUUCUGGUUGGGACU | 8169 | AAUCGCCUUGUGGACCUCUGC |
| 5566 | CAGGGGUUCUGGUUGGGACUG | 8170 | AUCGCCUUGUGGACCUCUGCA |
| 5567 | AGGGGUUCUGGUUGGGACUGU | 8171 | UCGCCUUGUGGACCUCUGCAG |
| 5568 | GGGGUUCUGGUUGGGACUGUC | 8172 | CGCCUUGUGGACCUCUGCAGA |
| 5569 | GGGUUCUGGUUGGGACUGUCA | 8173 | GCCUUGUGGACCUCUGCAGAG |
| 5570 | GGUUCUGGUUGGGACUGUCAG | 8174 | CCUUGUGGACCUCUGCAGAGC |
| 5571 | GUUCUGGUUGGGACUGUCAGG | 8175 | CUUGUGGACCUCUGCAGAGCC |
| 5572 | UUCUGGUUGGGACUGUCAGGG | 8176 | UUGUGGACCUCUGCAGAGCCA |
| 5573 | UCUGGUUGGGACUGUCAGGGC | 8177 | UGUGGACCUCUGCAGAGCCAC |
| 5574 | CUGGUUGGGACUGUCAGGGCG | 8178 | GUGGACCUCUGCAGAGCCACU |
| 5575 | UGGUUGGGACUGUCAGGGCGA | 8179 | UGGACCUCUGCAGAGCCACUG |
| 5576 | GGUUGGGACUGUCAGGGCGAA | 8180 | GGACCUCUGCAGAGCCACUGG |
| 5577 | GUUGGGACUGUCAGGGCGAAA | 8181 | GACCUCUGCAGAGCCACUGGU |
| 5578 | UUGGGACUGUCAGGGCGAAAU | 8182 | ACCUCUGCAGAGCCACUGGUA |
| 5579 | UGGGACUGUCAGGGCGAAAUG | 8183 | CCUCUGCAGAGCCACUGGUAG |
| 5580 | GGGACUGUCAGGGCGAAAUGA | 8184 | CUCUGCAGAGCCACUGGUAGU |
| 5581 | GGACUGUCAGGGCGAAAUGAC | 8185 | UCUGCAGAGCCACUGGUAGUC |
| 5582 | GACUGUCAGGGCGAAAUGACC | 8186 | CUGCAGAGCCACUGGUAGUCA |
| 5583 | ACUGUCAGGGCGAAAUGACCA | 8187 | UGCAGAGCCACUGGUAGUCAG |
| 5584 | CUGUCAGGGCGAAAUGACCAG | 8188 | GCAGAGCCACUGGUAGUCAGA |
| 5585 | UGUCAGGGCGAAAUGACCAGC | 8189 | CAGAGCCACUGGUAGUCAGAC |
| 5586 | GUCAGGGCGAAAUGACCAGCA | 8190 | AGAGCCACUGGUAGUCAGACC |
| 5587 | UCAGGGCGAAAUGACCAGCAG | 8191 | GAGCCACUGGUAGUCAGACCA |
| 5588 | CAGGGCGAAAUGACCAGCAGA | 8192 | AGCCACUGGUAGUCAGACCAC |
| 5589 | AGGGCGAAAUGACCAGCAGAU | 8193 | GCCACUGGUAGUCAGACCACC |
| 5590 | GGGCGAAAUGACCAGCAGAUG | 8194 | CCACUGGUAGUCAGACCACCU |
| 5591 | GGCGAAAUGACCAGCAGAUGC | 8195 | CACUGGUAGUCAGACCACCUA |
| 5592 | GCGAAAUGACCAGCAGAUGCU | 8196 | ACUGGUAGUCAGACCACCUAA |
| 5593 | CGAAAUGACCAGCAGAUGCUG | 8197 | CUGGUAGUCAGACCACCUAAU |
| 5594 | GAAAUGACCAGCAGAUGCUGG | 8198 | UGGUAGUCAGACCACCUAAUU |
| 5595 | AAAUGACCAGCAGAUGCUGGG | 8199 | GGUAGUCAGACCACCUAAUUC |
| 5596 | AAUGACCAGCAGAUGCUGGGA | 8200 | GUAGUCAGACCACCUAAUUCG |
| 5597 | AUGACCAGCAGAUGCUGGGAC | 8201 | UAGUCAGACCACCUAAUUCGU |
| 5598 | UGACCAGCAGAUGCUGGGACA | 8202 | AGUCAGACCACCUAAUUCGUU |
| 5599 | GACCAGCAGAUGCUGGGACAG | 8203 | GUCAGACCACCUAAUUCGUUG |
| 5600 | ACCAGCAGAUGCUGGGACAGC | 8204 | UCAGACCACCUAAUUCGUUGG |
| 5601 | CCAGCAGAUGCUGGGACAGCA | 8205 | CAGACCACCUAAUUCGUUGGA |
| 5602 | CAGCAGAUGCUGGGACAGCAG | 8206 | AGACCACCUAAUUCGUUGGAG |
| 5603 | AGCAGAUGCUGGGACAGCAGC | 8207 | GACCACCUAAUUCGUUGGAGU |
| 5604 | GCAGAUGCUGGGACAGCAGCU | 8208 | ACCACCUAAUUCGUUGGAGUC |
| 5605 | CAGAUGCUGGGACAGCAGCUG | 8209 | CCACCUAAUUCGUUGGAGUCA |
| 5606 | AGAUGCUGGGACAGCAGCUGC | 8210 | CACCUAAUUCGUUGGAGUCAU |
| 5607 | GAUGCUGGGACAGCAGCUGCC | 8211 | ACCUAAUUCGUUGGAGUCAUU |
| 5608 | AUGCUGGGACAGCAGCUGCCC | 8212 | CCUAAUUCGUUGGAGUCAUUC |
| 5609 | UGCUGGGACAGCAGCUGCCCG | 8213 | CUAAUUCGUUGGAGUCAUUCA |
| 5610 | GCUGGGACAGCAGCUGCCCGC | 8214 | UAAUUCGUUGGAGUCAUUCAC |
| 5611 | CUGGGACAGCAGCUGCCCGCA | 8215 | AAUUCGUUGGAGUCAUUCACU |
| 5612 | UGGGACAGCAGCUGCCCGCAG | 8216 | AUUCGUUGGAGUCAUUCACUU |
| 5613 | GGGACAGCAGCUGCCCGCAGA | 8217 | UUCGUUGGAGUCAUUCACUUU |
| 5614 | GGACAGCAGCUGCCCGCAGAC | 8218 | UCGUUGGAGUCAUUCACUUUA |
| 5615 | GACAGCAGCUGCCCGCAGACU | 8219 | CGUUGGAGUCAUUCACUUUAG |
| 5616 | ACAGCAGCUGCCCGCAGACUC | 8220 | GUUGGAGUCAUUCACUUUAGA |
| 5617 | CAGCAGCUGCCCGCAGACUCG | 8221 | UUGGAGUCAUUCACUUUAGAA |
| 5618 | AGCAGCUGCCCGCAGACUCGG | 8222 | UGGAGUCAUUCACUUUAGAAU |
| 5619 | GCAGCUGCCCGCAGACUCGGG | 8223 | GGAGUCAUUCACUUUAGAAUG |
| 5620 | CAGCUGCCCGCAGACUCGGGA | 8224 | GAGUCAUUCACUUUAGAAUGC |
| 5621 | AGCUGCCCGCAGACUCGGGAG | 8225 | AGUCAUUCACUUUAGAAUGCU |
| 5622 | GCUGCCCGCAGACUCGGGAGG | 8226 | GUCAUUCACUUUAGAAUGCUG |
| 5623 | CUGCCCGCAGACUCGGGAGGU | 8227 | UCAUUCACUUUAGAAUGCUGU |
| 5624 | UGCCCGCAGACUCGGGAGGUA | 8228 | CAUUCACUUUAGAAUGCUGUG |
| 5625 | GCCCGCAGACUCGGGAGGUAG | 8229 | AUUCACUUUAGAAUGCUGUGU |
| 5626 | CCCGCAGACUCGGGAGGUAGG | 8230 | UUCACUUUAGAAUGCUGUGUC |
| 5627 | CCGCAGACUCGGGAGGUAGGA | 8231 | UCACUUUAGAAUGCUGUGUCA |
| 5628 | CGCAGACUCGGGAGGUAGGAG | 8232 | CACUUUAGAAUGCUGUGUCAC |
| 5629 | GCAGACUCGGGAGGUAGGAGG | 8233 | ACUUUAGAAUGCUGUGUCACU |
| 5630 | CAGACUCGGGAGGUAGGAGGA | 8234 | CUUUAGAAUGCUGUGUCACUA |
| 5631 | AGACUCGGGAGGUAGGAGGAC | 8235 | UUUAGAAUGCUGUGUCACUAU |
| 5632 | GACUCGGGAGGUAGGAGGACU | 8236 | UUAGAAUGCUGUGUCACUAUA |
| 5633 | ACUCGGGAGGUAGGAGGACUG | 8237 | UAGAAUGCUGUGUCACUAUAG |
| 5634 | CUCGGGAGGUAGGAGGACUGG | 8238 | AGAAUGCUGUGUCACUAUAGG |
| 5635 | UCGGGAGGUAGGAGGACUGGC | 8239 | GAAUGCUGUGUCACUAUAGGU |
| 5636 | CGGGAGGUAGGAGGACUGGCC | 8240 | AAUGCUGUGUCACUAUAGGUG |
| 5637 | GGGAGGUAGGAGGACUGGCCG | 8241 | AUGCUGUGUCACUAUAGGUGU |
| 5638 | GGAGGUAGGAGGACUGGCCGG | 8242 | UGCUGUGUCACUAUAGGUGUA |
| 5639 | GAGGUAGGAGGACUGGCCGGG | 8243 | GCUGUGUCACUAUAGGUGUAA |
| 5640 | AGGUAGGAGGACUGGCCGGGC | 8244 | CUGUGUCACUAUAGGUGUAAC |
| 5641 | GGUAGGAGGACUGGCCGGGCA | 8245 | UGUGUCACUAUAGGUGUAACU |
| 5642 | GUAGGAGGACUGGCCGGGCAG | 8246 | GUGUCACUAUAGGUGUAACUA |
| 5643 | UAGGAGGACUGGCCGGGCAGU | 8247 | UGUCACUAUAGGUGUAACUAC |
| 5644 | AGGAGGACUGGCCGGGCAGUG | 8248 | GUCACUAUAGGUGUAACUACG |
| 5645 | GGAGGACUGGCCGGGCAGUGU | 8249 | UCACUAUAGGUGUAACUACGU |
| 5646 | GAGGACUGGCCGGGCAGUGUG | 8250 | CACUAUAGGUGUAACUACGUC |
| 5647 | AGGACUGGCCGGGCAGUGUGC | 8251 | ACUAUAGGUGUAACUACGUCA |
| 5648 | GGACUGGCCGGGCAGUGUGCU | 8252 | CUAUAGGUGUAACUACGUCAC |
| 5649 | GACUGGCCGGGCAGUGUGCUG | 8253 | UAUAGGUGUAACUACGUCACU |
| 5650 | ACUGGCCGGGCAGUGUGCUGG | 8254 | AUAGGUGUAACUACGUCACUG |
| 5651 | CUGGCCGGGCAGUGUGCUGGG | 8255 | UAGGUGUAACUACGUCACUGG |
| 5652 | UGGCCGGGCAGUGUGCUGGGC | 8256 | AGGUGUAACUACGUCACUGGG |
| 5653 | GGCCGGGCAGUGUGCUGGGCC | 8257 | GGUGUAACUACGUCACUGGGA |
| 5654 | GCCGGGCAGUGUGCUGGGCCC | 8258 | GUGUAACUACGUCACUGGGAC |
| 5655 | CCGGGCAGUGUGCUGGGCCCU | 8259 | UGUAACUACGUCACUGGGACU |
| 5656 | CGGGCAGUGUGCUGGGCCCUG | 8260 | GUAACUACGUCACUGGGACUA |
| 5657 | GGGCAGUGUGCUGGGCCCUGC | 8261 | UAACUACGUCACUGGGACUAC |
| 5658 | GGCAGUGUGCUGGGCCCUGCC | 8262 | AACUACGUCACUGGGACUACC |
| 5659 | GCAGUGUGCUGGGCCCUGCCC | 8263 | ACUACGUCACUGGGACUACCU |
| 5660 | CAGUGUGCUGGGCCCUGCCCU | 8264 | CUACGUCACUGGGACUACCUC |
| 5661 | AGUGUGCUGGGCCCUGCCCUG | 8265 | UACGUCACUGGGACUACCUCU |
| 5662 | GUGUGCUGGGCCCUGCCCUGA | 8266 | ACGUCACUGGGACUACCUCUC |
| 5663 | UGUGCUGGGCCCUGCCCUGAG | 8267 | CGUCACUGGGACUACCUCUCU |
| 5664 | GUGCUGGGCCCUGCCCUGAGG | 8268 | GUCACUGGGACUACCUCUCUU |
| 5665 | UGCUGGGCCCUGCCCUGAGGA | 8269 | UCACUGGGACUACCUCUCUUC |
| 5666 | GCUGGGCCCUGCCCUGAGGAG | 8270 | CACUGGGACUACCUCUCUUCU |
| 5667 | CUGGGCCCUGCCCUGAGGAGA | 8271 | ACUGGGACUACCUCUCUUCUG |
| 5668 | UGGGCCCUGCCCUGAGGAGAC | 8272 | CUGGGACUACCUCUCUUCUGA |
| 5669 | GGGCCCUGCCCUGAGGAGACA | 8273 | UGGGACUACCUCUCUUCUGAA |
| 5670 | GGCCCUGCCCUGAGGAGACAG | 8274 | GGGACUACCUCUCUUCUGAAG |
| 5671 | GCCCUGCCCUGAGGAGACAGA | 8275 | GGACUACCUCUCUUCUGAAGC |
| 5672 | CCCUGCCCUGAGGAGACAGAC | 8276 | GACUACCUCUCUUCUGAAGCU |
| 5673 | CCUGCCCUGAGGAGACAGACC | 8277 | ACUACCUCUCUUCUGAAGCUU |
| 5674 | CUGCCCUGAGGAGACAGACCA | 8278 | CUACCUCUCUUCUGAAGCUUC |
| 5675 | UGCCCUGAGGAGACAGACCAG | 8279 | UACCUCUCUUCUGAAGCUUCC |
| 5676 | GCCCUGAGGAGACAGACCAGG | 8280 | ACCUCUCUUCUGAAGCUUCCU |
| 5677 | CCCUGAGGAGACAGACCAGGU | 8281 | CCUCUCUUCUGAAGCUUCCUG |
| 5678 | CCUGAGGAGACAGACCAGGUG | 8282 | CUCUCUUCUGAAGCUUCCUGA |
| 5679 | CUGAGGAGACAGACCAGGUGG | 8283 | UCUCUUCUGAAGCUUCCUGAU |
| 5680 | UGAGGAGACAGACCAGGUGGC | 8284 | CUCUUCUGAAGCUUCCUGAUU |
| 5681 | GAGGAGACAGACCAGGUGGCU | 8285 | UCUUCUGAAGCUUCCUGAUUA |
| 5682 | AGGAGACAGACCAGGUGGCUA | 8286 | CUUCUGAAGCUUCCUGAUUAA |
| 5683 | GGAGACAGACCAGGUGGCUAC | 8287 | UUCUGAAGCUUCCUGAUUAAG |
| 5684 | GAGACAGACCAGGUGGCUACA | 8288 | UCUGAAGCUUCCUGAUUAAGC |
| 5685 | AGACAGACCAGGUGGCUACAG | 8289 | CUGAAGCUUCCUGAUUAAGCU |
| 5686 | GACAGACCAGGUGGCUACAGG | 8290 | UGAAGCUUCCUGAUUAAGCUC |
| 5687 | ACAGACCAGGUGGCUACAGGA | 8291 | GAAGCUUCCUGAUUAAGCUCU |
| 5688 | CAGACCAGGUGGCUACAGGAU | 8292 | AAGCUUCCUGAUUAAGCUCUG |
| 5689 | AGACCAGGUGGCUACAGGAUC | 8293 | AGCUUCCUGAUUAAGCUCUGC |
| 5690 | GACCAGGUGGCUACAGGAUCU | 8294 | GCUUCCUGAUUAAGCUCUGCU |
| 5691 | ACCAGGUGGCUACAGGAUCUC | 8295 | CUUCCUGAUUAAGCUCUGCUG |
| 5692 | CCAGGUGGCUACAGGAUCUCC | 8296 | UUCCUGAUUAAGCUCUGCUGG |
| 5693 | CAGGUGGCUACAGGAUCUCCU | 8297 | UCCUGAUUAAGCUCUGCUGGU |
| 5694 | AGGUGGCUACAGGAUCUCCUC | 8298 | CCUGAUUAAGCUCUGCUGGUC |
| 5695 | GGUGGCUACAGGAUCUCCUCC | 8299 | CUGAUUAAGCUCUGCUGGUCA |
| 5696 | GUGGCUACAGGAUCUCCUCCC | 8300 | UGAUUAAGCUCUGCUGGUCAC |
| 5697 | UGGCUACAGGAUCUCCUCCCG | 8301 | GAUUAAGCUCUGCUGGUCACU |
| 5698 | GGCUACAGGAUCUCCUCCCGC | 8302 | AUUAAGCUCUGCUGGUCACUG |
| 5699 | GCUACAGGAUCUCCUCCCGCG | 8303 | UUAAGCUCUGCUGGUCACUGG |
| 5700 | CUACAGGAUCUCCUCCCGCGG | 8304 | UAAGCUCUGCUGGUCACUGGA |
| 5701 | UACAGGAUCUCCUCCCGCGGG | 8305 | AAGCUCUGCUGGUCACUGGAA |
| 5702 | ACAGGAUCUCCUCCCGCGGGC | 8306 | AGCUCUGCUGGUCACUGGAAG |
| 5703 | CAGGAUCUCCUCCCGCGGGCU | 8307 | GCUCUGCUGGUCACUGGAAGA |
| 5704 | AGGAUCUCCUCCCGCGGGCUC | 8308 | CUCUGCUGGUCACUGGAAGAU |
| 5705 | GGAUCUCCUCCCGCGGGCUCC | 8309 | UCUGCUGGUCACUGGAAGAUA |
| 5706 | GAUCUCCUCCCGCGGGCUCCU | 8310 | CUGCUGGUCACUGGAAGAUAC |
| 5707 | AUCUCCUCCCGCGGGCUCCUG | 8311 | UGCUGGUCACUGGAAGAUACA |
| 5708 | UCUCCUCCCGCGGGCUCCUGG | 8312 | GCUGGUCACUGGAAGAUACAG |
| 5709 | CUCCUCCCGCGGGCUCCUGGC | 8313 | CUGGUCACUGGAAGAUACAGC |
| 5710 | UCCUCCCGCGGGCUCCUGGCC | 8314 | UGGUCACUGGAAGAUACAGCA |
| 5711 | CCUCCCGCGGGCUCCUGGCCU | 8315 | GGUCACUGGAAGAUACAGCAG |
| 5712 | CUCCCGCGGGCUCCUGGCCUU | 8316 | GUCACUGGAAGAUACAGCAGG |
| 5713 | UCCCGCGGGCUCCUGGCCUUC | 8317 | UCACUGGAAGAUACAGCAGGU |
| 5714 | CCCGCGGGCUCCUGGCCUUCA | 8318 | CACUGGAAGAUACAGCAGGUC |
| 5715 | CCGCGGGCUCCUGGCCUUCAG | 8319 | ACUGGAAGAUACAGCAGGUCU |
| 5716 | CGCGGGCUCCUGGCCUUCAGA | 8320 | CUGGAAGAUACAGCAGGUCUG |
| 5717 | GCGGGCUCCUGGCCUUCAGAG | 8321 | UGGAAGAUACAGCAGGUCUGA |
| 5718 | CGGGCUCCUGGCCUUCAGAGG | 8322 | GGAAGAUACAGCAGGUCUGAG |
| 5719 | GGGCUCCUGGCCUUCAGAGGG | 8323 | GAAGAUACAGCAGGUCUGAGU |
| 5720 | GGCUCCUGGCCUUCAGAGGGG | 8324 | AAGAUACAGCAGGUCUGAGUG |
| 5721 | GCUCCUGGCCUUCAGAGGGGU | 8325 | AGAUACAGCAGGUCUGAGUGC |
| 5722 | CUCCUGGCCUUCAGAGGGGUC | 8326 | GAUACAGCAGGUCUGAGUGCA |
| 5723 | UCCUGGCCUUCAGAGGGGUCU | 8327 | AUACAGCAGGUCUGAGUGCAG |
| 5724 | CCUGGCCUUCAGAGGGGUCUG | 8328 | UACAGCAGGUCUGAGUGCAGC |
| 5725 | CUGGCCUUCAGAGGGGUCUGC | 8329 | ACAGCAGGUCUGAGUGCAGCU |
| 5726 | UGGCCUUCAGAGGGGUCUGCC | 8330 | CAGCAGGUCUGAGUGCAGCUC |
| 5727 | GGCCUUCAGAGGGGUCUGCCC | 8331 | AGCAGGUCUGAGUGCAGCUCU |
| 5728 | GCCUUCAGAGGGGUCUGCCCG | 8332 | GCAGGUCUGAGUGCAGCUCUG |
| 5729 | CCUUCAGAGGGGUCUGCCCGU | 8333 | CAGGUCUGAGUGCAGCUCUGG |
| 5730 | CUUCAGAGGGGUCUGCCCGUU | 8334 | AGGUCUGAGUGCAGCUCUGGG |
| 5731 | UUCAGAGGGGUCUGCCCGUUG | 8335 | GGUCUGAGUGCAGCUCUGGGU |
| 5732 | UCAGAGGGGUCUGCCCGUUGG | 8336 | GUCUGAGUGCAGCUCUGGGUG |
| 5733 | CAGAGGGGUCUGCCCGUUGGG | 8337 | UCUGAGUGCAGCUCUGGGUGG |
| 5734 | AGAGGGGUCUGCCCGUUGGGU | 8338 | CUGAGUGCAGCUCUGGGUGGG |
| 5735 | GAGGGGUCUGCCCGUUGGGUA | 8339 | UGAGUGCAGCUCUGGGUGGGC |
| 5736 | AGGGGUCUGCCCGUUGGGUAC | 8340 | GAGUGCAGCUCUGGGUGGGCU |
| 5737 | GGGGUCUGCCCGUUGGGUACA | 8341 | AGUGCAGCUCUGGGUGGGCUC |
| 5738 | GGGUCUGCCCGUUGGGUACAG | 8342 | GUGCAGCUCUGGGUGGGCUCU |
| 5739 | GGUCUGCCCGUUGGGUACAGA | 8343 | UGCAGCUCUGGGUGGGCUCUG |
| 5740 | GUCUGCCCGUUGGGUACAGAG | 8344 | GCAGCUCUGGGUGGGCUCUGC |
| 5741 | UCUGCCCGUUGGGUACAGAGC | 8345 | CAGCUCUGGGUGGGCUCUGCC |
| 5742 | CUGCCCGUUGGGUACAGAGCC | 8346 | AGCUCUGGGUGGGCUCUGCCU |
| 5743 | UGCCCGUUGGGUACAGAGCCA | 8347 | GCUCUGGGUGGGCUCUGCCUC |
| 5744 | GCCCGUUGGGUACAGAGCCAU | 8348 | CUCUGGGUGGGCUCUGCCUCC |
| 5745 | CCCGUUGGGUACAGAGCCAUU | 8349 | UCUGGGUGGGCUCUGCCUCCA |
| 5746 | CCGUUGGGUACAGAGCCAUUC | 8350 | CUGGGUGGGCUCUGCCUCCAA |
| 5747 | CGUUGGGUACAGAGCCAUUCU | 8351 | UGGGUGGGCUCUGCCUCCAAG |
| 5748 | GUUGGGUACAGAGCCAUUCUG | 8352 | GGGUGGGCUCUGCCUCCAAGA |
| 5749 | UUGGGUACAGAGCCAUUCUGA | 8353 | GGUGGGCUCUGCCUCCAAGAU |
| 5750 | UGGGUACAGAGCCAUUCUGAC | 8354 | GUGGGCUCUGCCUCCAAGAUG |
| 5751 | GGGUACAGAGCCAUUCUGACC | 8355 | UGGGCUCUGCCUCCAAGAUGC |
| 5752 | GGUACAGAGCCAUUCUGACCA | 8356 | GGGCUCUGCCUCCAAGAUGCC |
| 5753 | GUACAGAGCCAUUCUGACCAU | 8357 | GGCUCUGCCUCCAAGAUGCCC |
| 5754 | UACAGAGCCAUUCUGACCAUG | 8358 | GCUCUGCCUCCAAGAUGCCCA |
| 5755 | ACAGAGCCAUUCUGACCAUGC | 8359 | CUCUGCCUCCAAGAUGCCCAG |
| 5756 | CAGAGCCAUUCUGACCAUGCA | 8360 | UCUGCCUCCAAGAUGCCCAGU |
| 5757 | AGAGCCAUUCUGACCAUGCAG | 8361 | CUGCCUCCAAGAUGCCCAGUU |
| 5758 | GAGCCAUUCUGACCAUGCAGG | 8362 | UGCCUCCAAGAUGCCCAGUUC |
| 5759 | AGCCAUUCUGACCAUGCAGGA | 8363 | GCCUCCAAGAUGCCCAGUUCC |
| 5760 | GCCAUUCUGACCAUGCAGGAG | 8364 | CCUCCAAGAUGCCCAGUUCCA |
| 5761 | CCAUUCUGACCAUGCAGGAGU | 8365 | CUCCAAGAUGCCCAGUUCCAA |
| 5762 | CAUUCUGACCAUGCAGGAGUU | 8366 | UCCAAGAUGCCCAGUUCCAAC |
| 5763 | AUUCUGACCAUGCAGGAGUUU | 8367 | CCAAGAUGCCCAGUUCCAACC |
| 5764 | UUCUGACCAUGCAGGAGUUUG | 8368 | CAAGAUGCCCAGUUCCAACCU |
| 5765 | UCUGACCAUGCAGGAGUUUGC | 8369 | AAGAUGCCCAGUUCCAACCUA |
| 5766 | CUGACCAUGCAGGAGUUUGCC | 8370 | AGAUGCCCAGUUCCAACCUAG |
| 5767 | UGACCAUGCAGGAGUUUGCCC | 8371 | GAUGCCCAGUUCCAACCUAGC |
| 5768 | GACCAUGCAGGAGUUUGCCCU | 8372 | AUGCCCAGUUCCAACCUAGCC |
| 5769 | ACCAUGCAGGAGUUUGCCCUU | 8373 | UGCCCAGUUCCAACCUAGCCC |
| 5770 | CCAUGCAGGAGUUUGCCCUUC | 8374 | GCCCAGUUCCAACCUAGCCCC |
| 5771 | CAUGCAGGAGUUUGCCCUUCU | 8375 | CCCAGUUCCAACCUAGCCCCA |
| 5772 | AUGCAGGAGUUUGCCCUUCUC | 8376 | CCAGUUCCAACCUAGCCCCAG |
| 5773 | UGCAGGAGUUUGCCCUUCUCU | 8377 | CAGUUCCAACCUAGCCCCAGA |
| 5774 | GCAGGAGUUUGCCCUUCUCUC | 8378 | AGUUCCAACCUAGCCCCAGAA |
| 5775 | CAGGAGUUUGCCCUUCUCUCG | 8379 | GUUCCAACCUAGCCCCAGAAG |
| 5776 | AGGAGUUUGCCCUUCUCUCGG | 8380 | UUCCAACCUAGCCCCAGAAGA |
| 5777 | GGAGUUUGCCCUUCUCUCGGU | 8381 | UCCAACCUAGCCCCAGAAGAU |
| 5778 | GAGUUUGCCCUUCUCUCGGUC | 8382 | CCAACCUAGCCCCAGAAGAUG |
| 5779 | AGUUUGCCCUUCUCUCGGUCU | 8383 | CAACCUAGCCCCAGAAGAUGU |
| 5780 | GUUUGCCCUUCUCUCGGUCUG | 8384 | AACCUAGCCCCAGAAGAUGUG |
| 5781 | UUUGCCCUUCUCUCGGUCUGG | 8385 | ACCUAGCCCCAGAAGAUGUGG |
| 5782 | UUGCCCUUCUCUCGGUCUGGC | 8386 | CCUAGCCCCAGAAGAUGUGGU |
| 5783 | UGCCCUUCUCUCGGUCUGGCC | 8387 | CUAGCCCCAGAAGAUGUGGUA |
| 5784 | GCCCUUCUCUCGGUCUGGCCA | 8388 | UAGCCCCAGAAGAUGUGGUAC |
| 5785 | CCCUUCUCUCGGUCUGGCCAU | 8389 | AGCCCCAGAAGAUGUGGUACA |
| 5786 | CCUUCUCUCGGUCUGGCCAUG | 8390 | GCCCCAGAAGAUGUGGUACAU |
| 5787 | CUUCUCUCGGUCUGGCCAUGU | 8391 | CCCCAGAAGAUGUGGUACAUC |
| 5788 | UUCUCUCGGUCUGGCCAUGUA | 8392 | CCCAGAAGAUGUGGUACAUCA |
| 5789 | UCUCUCGGUCUGGCCAUGUAA | 8393 | CCAGAAGAUGUGGUACAUCAU |
| 5790 | CUCUCGGUCUGGCCAUGUAAA | 8394 | CAGAAGAUGUGGUACAUCAUC |
| 5791 | UCUCGGUCUGGCCAUGUAAAG | 8395 | AGAAGAUGUGGUACAUCAUCU |
| 5792 | CUCGGUCUGGCCAUGUAAAGA | 8396 | GAAGAUGUGGUACAUCAUCUU |
| 5793 | UCGGUCUGGCCAUGUAAAGAU | 8397 | AAGAUGUGGUACAUCAUCUUC |
| 5794 | CGGUCUGGCCAUGUAAAGAUG | 8398 | AGAUGUGGUACAUCAUCUUCA |
| 5795 | GGUCUGGCCAUGUAAAGAUGG | 8399 | GAUGUGGUACAUCAUCUUCAG |
| 5796 | GUCUGGCCAUGUAAAGAUGGC | 8400 | AUGUGGUACAUCAUCUUCAGG |
| 5797 | UCUGGCCAUGUAAAGAUGGCA | 8401 | UGUGGUACAUCAUCUUCAGGU |
| 5798 | CUGGCCAUGUAAAGAUGGCAU | 8402 | GUGGUACAUCAUCUUCAGGUA |
| 5799 | UGGCCAUGUAAAGAUGGCAUC | 8403 | UGGUACAUCAUCUUCAGGUAG |
| 5800 | GGCCAUGUAAAGAUGGCAUCA | 8404 | GGUACAUCAUCUUCAGGUAGA |
| 5801 | GCCAUGUAAAGAUGGCAUCAU | 8405 | GUACAUCAUCUUCAGGUAGAA |
| 5802 | CCAUGUAAAGAUGGCAUCAUC | 8406 | UACAUCAUCUUCAGGUAGAAA |
| 5803 | CAUGUAAAGAUGGCAUCAUCG | 8407 | ACAUCAUCUUCAGGUAGAAAG |
| 5804 | AUGUAAAGAUGGCAUCAUCGC | 8408 | CAUCAUCUUCAGGUAGAAAGC |
| 5805 | UGUAAAGAUGGCAUCAUCGCU | 8409 | AUCAUCUUCAGGUAGAAAGCC |
| 5806 | GUAAAGAUGGCAUCAUCGCUG | 8410 | UCAUCUUCAGGUAGAAAGCCC |
| 5807 | UAAAGAUGGCAUCAUCGCUGU | 8411 | CAUCUUCAGGUAGAAAGCCCA |
| 5808 | AAAGAUGGCAUCAUCGCUGUC | 8412 | AUCUUCAGGUAGAAAGCCCAA |
| 5809 | AAGAUGGCAUCAUCGCUGUCC | 8413 | UCUUCAGGUAGAAAGCCCAAA |
| 5810 | AGAUGGCAUCAUCGCUGUCCA | 8414 | CUUCAGGUAGAAAGCCCAAAU |
| 5811 | GAUGGCAUCAUCGCUGUCCAG | 8415 | UUCAGGUAGAAAGCCCAAAUC |
| 5812 | AUGGCAUCAUCGCUGUCCAGC | 8416 | UCAGGUAGAAAGCCCAAAUCA |
| 5813 | UGGCAUCAUCGCUGUCCAGCU | 8417 | CAGGUAGAAAGCCCAAAUCAU |
| 5814 | GGCAUCAUCGCUGUCCAGCUC | 8418 | AGGUAGAAAGCCCAAAUCAUC |
| 5815 | GCAUCAUCGCUGUCCAGCUCU | 8419 | GGUAGAAAGCCCAAAUCAUCU |
| 5816 | CAUCAUCGCUGUCCAGCUCUG | 8420 | GUAGAAAGCCCAAAUCAUCUG |
| 5817 | AUCAUCGCUGUCCAGCUCUGA | 8421 | UAGAAAGCCCAAAUCAUCUGC |
| 5818 | UCAUCGCUGUCCAGCUCUGAC | 8422 | AGAAAGCCCAAAUCAUCUGCA |
| 5819 | CAUCGCUGUCCAGCUCUGACU | 8423 | GAAAGCCCAAAUCAUCUGCAG |
| 5820 | AUCGCUGUCCAGCUCUGACUC | 8424 | AAAGCCCAAAUCAUCUGCAGU |
| 5821 | UCGCUGUCCAGCUCUGACUCG | 8425 | AAGCCCAAAUCAUCUGCAGUU |
| 5822 | CGCUGUCCAGCUCUGACUCGG | 8426 | AGCCCAAAUCAUCUGCAGUUU |
| 5823 | GCUGUCCAGCUCUGACUCGGA | 8427 | GCCCAAAUCAUCUGCAGUUUG |
| 5824 | CUGUCCAGCUCUGACUCGGAG | 8428 | CCCAAAUCAUCUGCAGUUUGG |
| 5825 | UGUCCAGCUCUGACUCGGAGU | 8429 | CCAAAUCAUCUGCAGUUUGGA |
| 5826 | GUCCAGCUCUGACUCGGAGUG | 8430 | CAAAUCAUCUGCAGUUUGGAA |
| 5827 | UCCAGCUCUGACUCGGAGUGC | 8431 | AAAUCAUCUGCAGUUUGGAAU |
| 5828 | CCAGCUCUGACUCGGAGUGCA | 8432 | AAUCAUCUGCAGUUUGGAAUU |
| 5829 | CAGCUCUGACUCGGAGUGCAU | 8433 | AUCAUCUGCAGUUUGGAAUUU |
| 5830 | AGCUCUGACUCGGAGUGCAUC | 8434 | UCAUCUGCAGUUUGGAAUUUU |
| 5831 | GCUCUGACUCGGAGUGCAUCA | 8435 | CAUCUGCAGUUUGGAAUUUUU |
| 5832 | CUCUGACUCGGAGUGCAUCAG | 8436 | AUCUGCAGUUUGGAAUUUUUU |
| 5833 | UCUGACUCGGAGUGCAUCAGG | 8437 | UCUGCAGUUUGGAAUUUUUUU |
| 5834 | CUGACUCGGAGUGCAUCAGGC | 8438 | CUGCAGUUUGGAAUUUUUUUA |
| 5835 | UGACUCGGAGUGCAUCAGGCU | 8439 | UGCAGUUUGGAAUUUUUUUAA |
| 5836 | GACUCGGAGUGCAUCAGGCUG | 8440 | GCAGUUUGGAAUUUUUUUAAA |
| 5837 | ACUCGGAGUGCAUCAGGCUGC | 8441 | CAGUUUGGAAUUUUUUUAAAA |
| 5838 | CUCGGAGUGCAUCAGGCUGCU | 8442 | AGUUUGGAAUUUUUUUAAAAA |
| 5839 | UCGGAGUGCAUCAGGCUGCUA | 8443 | GUUUGGAAUUUUUUUAAAAAC |
| 5840 | CGGAGUGCAUCAGGCUGCUAC | 8444 | UUUGGAAUUUUUUUAAAAACA |
| 5841 | GGAGUGCAUCAGGCUGCUACU | 8445 | UUGGAAUUUUUUUAAAAACAC |
| 5842 | GAGUGCAUCAGGCUGCUACUU | 8446 | UGGAAUUUUUUUAAAAACACC |
| 5843 | AGUGCAUCAGGCUGCUACUUA | 8447 | GGAAUUUUUUUAAAAACACCA |
| 5844 | GUGCAUCAGGCUGCUACUUAG | 8448 | GAAUUUUUUUAAAAACACCAG |
| 5845 | UGCAUCAGGCUGCUACUUAGC | 8449 | AAUUUUUUUAAAAACACCAGC |
| 5846 | GCAUCAGGCUGCUACUUAGCA | 8450 | AUUUUUUUAAAAACACCAGCA |
| 5847 | CAUCAGGCUGCUACUUAGCAA | 8451 | UUUUUUUAAAAACACCAGCAU |
| 5848 | AUCAGGCUGCUACUUAGCAAA | 8452 | UUUUUUAAAAACACCAGCAUG |
| 5849 | UCAGGCUGCUACUUAGCAAAA | 8453 | UUUUUAAAAACACCAGCAUGG |
| 5850 | CAGGCUGCUACUUAGCAAAAG | 8454 | UUUUAAAAACACCAGCAUGGA |
| 5851 | AGGCUGCUACUUAGCAAAAGG | 8455 | UUUAAAAACACCAGCAUGGAA |
| 5852 | GGCUGCUACUUAGCAAAAGGC | 8456 | UUAAAAACACCAGCAUGGAAU |
| 5853 | GCUGCUACUUAGCAAAAGGCC | 8457 | UAAAAACACCAGCAUGGAAUU |
| 5854 | CUGCUACUUAGCAAAAGGCCU | 8458 | AAAAACACCAGCAUGGAAUUG |
| 5855 | UGCUACUUAGCAAAAGGCCUU | 8459 | AAAACACCAGCAUGGAAUUGG |
| 5856 | GCUACUUAGCAAAAGGCCUUU | 8460 | AAACACCAGCAUGGAAUUGGA |
| 5857 | CUACUUAGCAAAAGGCCUUUC | 8461 | AACACCAGCAUGGAAUUGGAG |
| 5858 | UACUUAGCAAAAGGCCUUUCU | 8462 | ACACCAGCAUGGAAUUGGAGG |
| 5859 | ACUUAGCAAAAGGCCUUUCUG | 8463 | CACCAGCAUGGAAUUGGAGGA |
| 5860 | CUUAGCAAAAGGCCUUUCUGU | 8464 | ACCAGCAUGGAAUUGGAGGAG |
| 5861 | UUAGCAAAAGGCCUUUCUGUU | 8465 | CCAGCAUGGAAUUGGAGGAGU |
| 5862 | UAGCAAAAGGCCUUUCUGUUU | 8466 | CAGCAUGGAAUUGGAGGAGUG |
| 5863 | AGCAAAAGGCCUUUCUGUUUG | 8467 | AGCAUGGAAUUGGAGGAGUGU |
| 5864 | GCAAAAGGCCUUUCUGUUUGA | 8468 | GCAUGGAAUUGGAGGAGUGUG |
| 5865 | CAAAAGGCCUUUCUGUUUGAU | 8469 | CAUGGAAUUGGAGGAGUGUGU |
| 5866 | AAAAGGCCUUUCUGUUUGAUG | 8470 | AUGGAAUUGGAGGAGUGUGUC |
| 5867 | AAAGGCCUUUCUGUUUGAUGC | 8471 | UGGAAUUGGAGGAGUGUGUCC |
| 5868 | AAGGCCUUUCUGUUUGAUGCC | 8472 | GGAAUUGGAGGAGUGUGUCCU |
| 5869 | AGGCCUUUCUGUUUGAUGCCU | 8473 | GAAUUGGAGGAGUGUGUCCUA |
| 5870 | GGCCUUUCUGUUUGAUGCCUG | 8474 | AAUUGGAGGAGUGUGUCCUAA |
| 5871 | GCCUUUCUGUUUGAUGCCUGC | 8475 | AUUGGAGGAGUGUGUCCUAAA |
| 5872 | CCUUUCUGUUUGAUGCCUGCU | 8476 | UUGGAGGAGUGUGUCCUAAAA |
| 5873 | CUUUCUGUUUGAUGCCUGCUC | 8477 | UGGAGGAGUGUGUCCUAAAAG |
| 5874 | UUUCUGUUUGAUGCCUGCUCG | 8478 | GGAGGAGUGUGUCCUAAAAGC |
| 5875 | UUCUGUUUGAUGCCUGCUCGG | 8479 | GAGGAGUGUGUCCUAAAAGCC |
| 5876 | UCUGUUUGAUGCCUGCUCGGG | 8480 | AGGAGUGUGUCCUAAAAGCCC |
| 5877 | CUGUUUGAUGCCUGCUCGGGA | 8481 | GGAGUGUGUCCUAAAAGCCCG |
| 5878 | UGUUUGAUGCCUGCUCGGGAG | 8482 | GAGUGUGUCCUAAAAGCCCGG |
| 5879 | GUUUGAUGCCUGCUCGGGAGG | 8483 | AGUGUGUCCUAAAAGCCCGGC |
| 5880 | UUUGAUGCCUGCUCGGGAGGU | 8484 | GUGUGUCCUAAAAGCCCGGCA |
| 5881 | UUGAUGCCUGCUCGGGAGGUU | 8485 | UGUGUCCUAAAAGCCCGGCAG |
| 5882 | UGAUGCCUGCUCGGGAGGUUG | 8486 | GUGUCCUAAAAGCCCGGCAGC |
| 5883 | GAUGCCUGCUCGGGAGGUUGG | 8487 | UGUCCUAAAAGCCCGGCAGCU |
| 5884 | AUGCCUGCUCGGGAGGUUGGC | 8488 | GUCCUAAAAGCCCGGCAGCUC |
| 5885 | UGCCUGCUCGGGAGGUUGGCU | 8489 | UCCUAAAAGCCCGGCAGCUCU |
| 5886 | GCCUGCUCGGGAGGUUGGCUU | 8490 | CCUAAAAGCCCGGCAGCUCUG |
| 5887 | CCUGCUCGGGAGGUUGGCUUC | 8491 | CUAAAAGCCCGGCAGCUCUGG |
| 5888 | CUGCUCGGGAGGUUGGCUUCA | 8492 | UAAAAGCCCGGCAGCUCUGGG |
| 5889 | UGCUCGGGAGGUUGGCUUCAG | 8493 | AAAAGCCCGGCAGCUCUGGGG |
| 5890 | GCUCGGGAGGUUGGCUUCAGC | 8494 | AAAGCCCGGCAGCUCUGGGGC |
| 5891 | CUCGGGAGGUUGGCUUCAGCU | 8495 | AAGCCCGGCAGCUCUGGGGCC |
| 5892 | UCGGGAGGUUGGCUUCAGCUC | 8496 | AGCCCGGCAGCUCUGGGGCCU |
| 5893 | CGGGAGGUUGGCUUCAGCUCC | 8497 | GCCCGGCAGCUCUGGGGCCUG |
| 5894 | GGGAGGUUGGCUUCAGCUCCA | 8498 | CCCGGCAGCUCUGGGGCCUGC |
| 5895 | GGAGGUUGGCUUCAGCUCCAG | 8499 | CCGGCAGCUCUGGGGCCUGCU |
| 5896 | GAGGUUGGCUUCAGCUCCAGG | 8500 | CGGCAGCUCUGGGGCCUGCUG |
| 5897 | AGGUUGGCUUCAGCUCCAGGC | 8501 | GGCAGCUCUGGGGCCUGCUGC |
| 5898 | GGUUGGCUUCAGCUCCAGGCU | 8502 | GCAGCUCUGGGGCCUGCUGCA |
| 5899 | GUUGGCUUCAGCUCCAGGCUU | 8503 | CAGCUCUGGGGCCUGCUGCAG |
| 5900 | UUGGCUUCAGCUCCAGGCUUU | 8504 | AGCUCUGGGGCCUGCUGCAGU |
| 5901 | UGGCUUCAGCUCCAGGCUUUC | 8505 | GCUCUGGGGCCUGCUGCAGUC |
| 5902 | GGCUUCAGCUCCAGGCUUUCC | 8506 | CUCUGGGGCCUGCUGCAGUCU |
| 5903 | GCUUCAGCUCCAGGCUUUCCU | 8507 | UCUGGGGCCUGCUGCAGUCUG |
| 5904 | CUUCAGCUCCAGGCUUUCCUG | 8508 | CUGGGGCCUGCUGCAGUCUGC |
| 5905 | UUCAGCUCCAGGCUUUCCUGA | 8509 | UGGGGCCUGCUGCAGUCUGCC |
| 5906 | UCAGCUCCAGGCUUUCCUGAU | 8510 | GGGGCCUGCUGCAGUCUGCCU |
| 5907 | CAGCUCCAGGCUUUCCUGAUC | 8511 | GGGCCUGCUGCAGUCUGCCUG |
| 5908 | AGCUCCAGGCUUUCCUGAUCC | 8512 | GGCCUGCUGCAGUCUGCCUGA |
| 5909 | GCUCCAGGCUUUCCUGAUCCG | 8513 | GCCUGCUGCAGUCUGCCUGAA |
| 5910 | CUCCAGGCUUUCCUGAUCCGU | 8514 | CCUGCUGCAGUCUGCCUGAAU |
| 5911 | UCCAGGCUUUCCUGAUCCGUG | 8515 | CUGCUGCAGUCUGCCUGAAUG |
| 5912 | CCAGGCUUUCCUGAUCCGUGG | 8516 | UGCUGCAGUCUGCCUGAAUGC |
| 5913 | CAGGCUUUCCUGAUCCGUGGC | 8517 | GCUGCAGUCUGCCUGAAUGCA |
| 5914 | AGGCUUUCCUGAUCCGUGGCA | 8518 | CUGCAGUCUGCCUGAAUGCAC |
| 5915 | GGCUUUCCUGAUCCGUGGCAU | 8519 | UGCAGUCUGCCUGAAUGCACA |
| 5916 | GCUUUCCUGAUCCGUGGCAUC | 8520 | GCAGUCUGCCUGAAUGCACAU |
| 5917 | CUUUCCUGAUCCGUGGCAUCC | 8521 | CAGUCUGCCUGAAUGCACAUC |
| 5918 | UUUCCUGAUCCGUGGCAUCCA | 8522 | AGUCUGCCUGAAUGCACAUCC |
| 5919 | UUCCUGAUCCGUGGCAUCCAG | 8523 | GUCUGCCUGAAUGCACAUCCC |
| 5920 | UCCUGAUCCGUGGCAUCCAGG | 8524 | UCUGCCUGAAUGCACAUCCCU |
| 5921 | CCUGAUCCGUGGCAUCCAGGA | 8525 | CUGCCUGAAUGCACAUCCCUU |
| 5922 | CUGAUCCGUGGCAUCCAGGAU | 8526 | UGCCUGAAUGCACAUCCCUUC |
| 5923 | UGAUCCGUGGCAUCCAGGAUC | 8527 | GCCUGAAUGCACAUCCCUUCU |
| 5924 | GAUCCGUGGCAUCCAGGAUCU | 8528 | CCUGAAUGCACAUCCCUUCUA |
| 5925 | AUCCGUGGCAUCCAGGAUCUU | 8529 | CUGAAUGCACAUCCCUUCUAG |
| 5926 | UCCGUGGCAUCCAGGAUCUUG | 8530 | UGAAUGCACAUCCCUUCUAGC |
| 5927 | CCGUGGCAUCCAGGAUCUUGU | 8531 | GAAUGCACAUCCCUUCUAGCC |
| 5928 | CGUGGCAUCCAGGAUCUUGUA | 8532 | AAUGCACAUCCCUUCUAGCCA |
| 5929 | GUGGCAUCCAGGAUCUUGUAC | 8533 | AUGCACAUCCCUUCUAGCCAC |
| 5930 | UGGCAUCCAGGAUCUUGUACU | 8534 | UGCACAUCCCUUCUAGCCACC |
| 5931 | GGCAUCCAGGAUCUUGUACUU | 8535 | GCACAUCCCUUCUAGCCACCA |
| 5932 | GCAUCCAGGAUCUUGUACUUG | 8536 | CACAUCCCUUCUAGCCACCAA |
| 5933 | CAUCCAGGAUCUUGUACUUGC | 8537 | ACAUCCCUUCUAGCCACCAAA |
| 5934 | AUCCAGGAUCUUGUACUUGCU | 8538 | CAUCCCUUCUAGCCACCAAAA |
| 5935 | UCCAGGAUCUUGUACUUGCUU | 8539 | AUCCCUUCUAGCCACCAAAAG |
| 5936 | CCAGGAUCUUGUACUUGCUUU | 8540 | UCCCUUCUAGCCACCAAAAGA |
| 5937 | CAGGAUCUUGUACUUGCUUUU | 8541 | CCCUUCUAGCCACCAAAAGAC |
| 5938 | AGGAUCUUGUACUUGCUUUUC | 8542 | CCUUCUAGCCACCAAAAGACA |
| 5939 | GGAUCUUGUACUUGCUUUUCC | 8543 | CUUCUAGCCACCAAAAGACAU |
| 5940 | GAUCUUGUACUUGCUUUUCCU | 8544 | UUCUAGCCACCAAAAGACAUG |
| 5941 | AUCUUGUACUUGCUUUUCCUC | 8545 | UCUAGCCACCAAAAGACAUGG |
| 5942 | UCUUGUACUUGCUUUUCCUCU | 8546 | CUAGCCACCAAAAGACAUGGC |
| 5943 | CUUGUACUUGCUUUUCCUCUU | 8547 | UAGCCACCAAAAGACAUGGCA |
| 5944 | UUGUACUUGCUUUUCCUCUUG | 8548 | AGCCACCAAAAGACAUGGCAG |
| 5945 | UGUACUUGCUUUUCCUCUUGG | 8549 | GCCACCAAAAGACAUGGCAGG |
| 5946 | GUACUUGCUUUUCCUCUUGGG | 8550 | CCACCAAAAGACAUGGCAGGC |
| 5947 | UACUUGCUUUUCCUCUUGGGU | 8551 | CACCAAAAGACAUGGCAGGCA |
| 5948 | ACUUGCUUUUCCUCUUGGGUU | 8552 | ACCAAAAGACAUGGCAGGCAG |
| 5949 | CUUGCUUUUCCUCUUGGGUUU | 8553 | CCAAAAGACAUGGCAGGCAGA |
| 5950 | UUGCUUUUCCUCUUGGGUUUU | 8554 | CAAAAGACAUGGCAGGCAGAG |
| 5951 | UGCUUUUCCUCUUGGGUUUUC | 8555 | AAAAGACAUGGCAGGCAGAGU |
| 5952 | GCUUUUCCUCUUGGGUUUUCC | 8556 | AAAGACAUGGCAGGCAGAGUC |
| 5953 | CUUUUCCUCUUGGGUUUUCCU | 8557 | AAGACAUGGCAGGCAGAGUCC |
| 5954 | UUUUCCUCUUGGGUUUUCCUU | 8558 | AGACAUGGCAGGCAGAGUCCU |
| 5955 | UUUCCUCUUGGGUUUUCCUUU | 8559 | GACAUGGCAGGCAGAGUCCUG |
| 5956 | UUCCUCUUGGGUUUUCCUUUU | 8560 | ACAUGGCAGGCAGAGUCCUGG |
| 5957 | UCCUCUUGGGUUUUCCUUUUU | 8561 | CAUGGCAGGCAGAGUCCUGGC |
| 5958 | CCUCUUGGGUUUUCCUUUUUG | 8562 | AUGGCAGGCAGAGUCCUGGCA |
| 5959 | CUCUUGGGUUUUCCUUUUUGC | 8563 | UGGCAGGCAGAGUCCUGGCAG |
| 5960 | UCUUGGGUUUUCCUUUUUGCC | 8564 | GGCAGGCAGAGUCCUGGCAGC |
| 5961 | CUUGGGUUUUCCUUUUUGCCU | 8565 | GCAGGCAGAGUCCUGGCAGCA |
| 5962 | UUGGGUUUUCCUUUUUGCCUC | 8566 | CAGGCAGAGUCCUGGCAGCAG |
| 5963 | UGGGUUUUCCUUUUUGCCUCU | 8567 | AGGCAGAGUCCUGGCAGCAGG |
| 5964 | GGGUUUUCCUUUUUGCCUCUU | 8568 | GGCAGAGUCCUGGCAGCAGGC |
| 5965 | GGUUUUCCUUUUUGCCUCUUA | 8569 | GCAGAGUCCUGGCAGCAGGCA |
| 5966 | GUUUUCCUUUUUGCCUCUUAC | 8570 | CAGAGUCCUGGCAGCAGGCAG |
| 5967 | UUUUCCUUUUUGCCUCUUACA | 8571 | AGAGUCCUGGCAGCAGGCAGC |
| 5968 | UUUCCUUUUUGCCUCUUACAA | 8572 | GAGUCCUGGCAGCAGGCAGCC |
| 5969 | UUCCUUUUUGCCUCUUACAAC | 8573 | AGUCCUGGCAGCAGGCAGCCC |
| 5970 | UCCUUUUUGCCUCUUACAACA | 8574 | GUCCUGGCAGCAGGCAGCCCA |
| 5971 | CCUUUUUGCCUCUUACAACAA | 8575 | UCCUGGCAGCAGGCAGCCCAA |
| 5972 | CUUUUUGCCUCUUACAACAAC | 8576 | CCUGGCAGCAGGCAGCCCAAC |
| 5973 | UUUUUGCCUCUUACAACAACA | 8577 | CUGGCAGCAGGCAGCCCAACA |
| 5974 | UUUUGCCUCUUACAACAACAG | 8578 | UGGCAGCAGGCAGCCCAACAU |
| 5975 | UUUGCCUCUUACAACAACAGA | 8579 | GGCAGCAGGCAGCCCAACAUG |
| 5976 | UUGCCUCUUACAACAACAGAU | 8580 | GCAGCAGGCAGCCCAACAUGA |
| 5977 | UGCCUCUUACAACAACAGAUC | 8581 | CAGCAGGCAGCCCAACAUGAC |
| 5978 | GCCUCUUACAACAACAGAUCA | 8582 | AGCAGGCAGCCCAACAUGACU |
| 5979 | CCUCUUACAACAACAGAUCAC | 8583 | GCAGGCAGCCCAACAUGACUG |
| 5980 | CUCUUACAACAACAGAUCACA | 8584 | CAGGCAGCCCAACAUGACUGG |
| 5981 | UCUUACAACAACAGAUCACAG | 8585 | AGGCAGCCCAACAUGACUGGA |
| 5982 | CUUACAACAACAGAUCACAGU | 8586 | GGCAGCCCAACAUGACUGGAG |
| 5983 | UUACAACAACAGAUCACAGUC | 8587 | GCAGCCCAACAUGACUGGAGA |
| 5984 | UACAACAACAGAUCACAGUCC | 8588 | CAGCCCAACAUGACUGGAGAG |
| 5985 | ACAACAACAGAUCACAGUCCA | 8589 | AGCCCAACAUGACUGGAGAGA |
| 5986 | CAACAACAGAUCACAGUCCAA | 8590 | GCCCAACAUGACUGGAGAGAG |
| 5987 | AACAACAGAUCACAGUCCAAG | 8591 | CCCAACAUGACUGGAGAGAGG |
| 5988 | ACAACAGAUCACAGUCCAAGA | 8592 | CCAACAUGACUGGAGAGAGGG |
| 5989 | CAACAGAUCACAGUCCAAGAC | 8593 | CAACAUGACUGGAGAGAGGGG |
| 5990 | AACAGAUCACAGUCCAAGACA | 8594 | AACAUGACUGGAGAGAGGGGG |
| 5991 | ACAGAUCACAGUCCAAGACAG | 8595 | ACAUGACUGGAGAGAGGGGGU |
| 5992 | CAGAUCACAGUCCAAGACAGG | 8596 | CAUGACUGGAGAGAGGGGGUU |
| 5993 | AGAUCACAGUCCAAGACAGGA | 8597 | AUGACUGGAGAGAGGGGGUUC |
| 5994 | GAUCACAGUCCAAGACAGGAU | 8598 | UGACUGGAGAGAGGGGGUUCC |
| 5995 | AUCACAGUCCAAGACAGGAUU | 8599 | GACUGGAGAGAGGGGGUUCCU |
| 5996 | UCACAGUCCAAGACAGGAUUC | 8600 | ACUGGAGAGAGGGGGUUCCUU |
| 5997 | CACAGUCCAAGACAGGAUUCC | 8601 | CUGGAGAGAGGGGGUUCCUUC |
| 5998 | ACAGUCCAAGACAGGAUUCCC | 8602 | UGGAGAGAGGGGGUUCCUUCA |
| 5999 | CAGUCCAAGACAGGAUUCCCA | 8603 | GGAGAGAGGGGGUUCCUUCAA |
| 6000 | AGUCCAAGACAGGAUUCCCAA | 8604 | GAGAGAGGGGGUUCCUUCAAG |
| 6001 | GUCCAAGACAGGAUUCCCAAG | 8605 | AGAGAGGGGGUUCCUUCAAGA |
| 6002 | UCCAAGACAGGAUUCCCAAGG | 8606 | GAGAGGGGGUUCCUUCAAGAA |
| 6003 | CCAAGACAGGAUUCCCAAGGC | 8607 | AGAGGGGGUUCCUUCAAGAAG |
| 6004 | CAAGACAGGAUUCCCAAGGCA | 8608 | GAGGGGGUUCCUUCAAGAAGC |
| 6005 | AAGACAGGAUUCCCAAGGCAA | 8609 | AGGGGGUUCCUUCAAGAAGCC |
| 6006 | AGACAGGAUUCCCAAGGCAAC | 8610 | GGGGGUUCCUUCAAGAAGCCA |
| 6007 | GACAGGAUUCCCAAGGCAACA | 8611 | GGGGUUCCUUCAAGAAGCCAG |
| 6008 | ACAGGAUUCCCAAGGCAACAA | 8612 | GGGUUCCUUCAAGAAGCCAGA |
| 6009 | CAGGAUUCCCAAGGCAACAAC | 8613 | GGUUCCUUCAAGAAGCCAGAG |
| 6010 | AGGAUUCCCAAGGCAACAACA | 8614 | GUUCCUUCAAGAAGCCAGAGG |
| 6011 | GGAUUCCCAAGGCAACAACAA | 8615 | UUCCUUCAAGAAGCCAGAGGU |
| 6012 | GAUUCCCAAGGCAACAACAAU | 8616 | UCCUUCAAGAAGCCAGAGGUG |
| 6013 | AUUCCCAAGGCAACAACAAUG | 8617 | CCUUCAAGAAGCCAGAGGUGA |
| 6014 | UUCCCAAGGCAACAACAAUGA | 8618 | CUUCAAGAAGCCAGAGGUGAU |
| 6015 | UCCCAAGGCAACAACAAUGAC | 8619 | UUCAAGAAGCCAGAGGUGAUU |
| 6016 | CCCAAGGCAACAACAAUGACA | 8620 | UCAAGAAGCCAGAGGUGAUUU |
| 6017 | CCAAGGCAACAACAAUGACAA | 8621 | CAAGAAGCCAGAGGUGAUUUU |
| 6018 | CAAGGCAACAACAAUGACAAA | 8622 | AAGAAGCCAGAGGUGAUUUUC |
| 6019 | AAGGCAACAACAAUGACAAAG | 8623 | AGAAGCCAGAGGUGAUUUUCU |
| 6020 | AGGCAACAACAAUGACAAAGG | 8624 | GAAGCCAGAGGUGAUUUUCUC |
| 6021 | GGCAACAACAAUGACAAAGGU | 8625 | AAGCCAGAGGUGAUUUUCUCC |
| 6022 | GCAACAACAAUGACAAAGGUA | 8626 | AGCCAGAGGUGAUUUUCUCCC |
| 6023 | CAACAACAAUGACAAAGGUAG | 8627 | GCCAGAGGUGAUUUUCUCCCC |
| 6024 | AACAACAAUGACAAAGGUAGC | 8628 | CCAGAGGUGAUUUUCUCCCCC |
| 6025 | ACAACAAUGACAAAGGUAGCA | 8629 | CAGAGGUGAUUUUCUCCCCCA |
| 6026 | CAACAAUGACAAAGGUAGCAA | 8630 | AGAGGUGAUUUUCUCCCCCAG |
| 6027 | AACAAUGACAAAGGUAGCAAU | 8631 | GAGGUGAUUUUCUCCCCCAGA |
| 6028 | ACAAUGACAAAGGUAGCAAUG | 8632 | AGGUGAUUUUCUCCCCCAGAU |
| 6029 | CAAUGACAAAGGUAGCAAUGA | 8633 | GGUGAUUUUCUCCCCCAGAUC |
| 6030 | AAUGACAAAGGUAGCAAUGAU | 8634 | GUGAUUUUCUCCCCCAGAUCU |
| 6031 | AUGACAAAGGUAGCAAUGAUA | 8635 | UGAUUUUCUCCCCCAGAUCUC |
| 6032 | UGACAAAGGUAGCAAUGAUAA | 8636 | GAUUUUCUCCCCCAGAUCUCA |
| 6033 | GACAAAGGUAGCAAUGAUAAC | 8637 | AUUUUCUCCCCCAGAUCUCAG |
| 6034 | ACAAAGGUAGCAAUGAUAACA | 8638 | UUUUCUCCCCCAGAUCUCAGG |
| 6035 | CAAAGGUAGCAAUGAUAACAU | 8639 | UUUCUCCCCCAGAUCUCAGGC |
| 6036 | AAAGGUAGCAAUGAUAACAUA | 8640 | UUCUCCCCCAGAUCUCAGGCC |
| 6037 | AAGGUAGCAAUGAUAACAUAU | 8641 | UCUCCCCCAGAUCUCAGGCCA |
| 6038 | AGGUAGCAAUGAUAACAUAUA | 8642 | CUCCCCCAGAUCUCAGGCCAA |
| 6039 | GGUAGCAAUGAUAACAUAUAA | 8643 | UCCCCCAGAUCUCAGGCCAAC |
| 6040 | GUAGCAAUGAUAACAUAUAAC | 8644 | CCCCCAGAUCUCAGGCCAACU |
| 6041 | UAGCAAUGAUAACAUAUAACA | 8645 | CCCCAGAUCUCAGGCCAACUC |
| 6042 | AGCAAUGAUAACAUAUAACAC | 8646 | CCCAGAUCUCAGGCCAACUCC |
| 6043 | GCAAUGAUAACAUAUAACACG | 8647 | CCAGAUCUCAGGCCAACUCCA |
| 6044 | CAAUGAUAACAUAUAACACGC | 8648 | CAGAUCUCAGGCCAACUCCAA |
| 6045 | AAUGAUAACAUAUAACACGCU | 8649 | AGAUCUCAGGCCAACUCCAAA |
| 6046 | AUGAUAACAUAUAACACGCUC | 8650 | GAUCUCAGGCCAACUCCAAAU |
| 6047 | UGAUAACAUAUAACACGCUCC | 8651 | AUCUCAGGCCAACUCCAAAUU |
| 6048 | GAUAACAUAUAACACGCUCCA | 8652 | UCUCAGGCCAACUCCAAAUUG |
| 6049 | AUAACAUAUAACACGCUCCAC | 8653 | CUCAGGCCAACUCCAAAUUGU |
| 6050 | UAACAUAUAACACGCUCCACU | 8654 | UCAGGCCAACUCCAAAUUGUG |
| 6051 | AACAUAUAACACGCUCCACUC | 8655 | CAGGCCAACUCCAAAUUGUGU |
| 6052 | ACAUAUAACACGCUCCACUCA | 8656 | AGGCCAACUCCAAAUUGUGUC |
| 6053 | CAUAUAACACGCUCCACUCAC | 8657 | GGCCAACUCCAAAUUGUGUCU |
| 6054 | AUAUAACACGCUCCACUCACA | 8658 | GCCAACUCCAAAUUGUGUCUU |
| 6055 | UAUAACACGCUCCACUCACAG | 8659 | CCAACUCCAAAUUGUGUCUUC |
| 6056 | AUAACACGCUCCACUCACAGU | 8660 | CAACUCCAAAUUGUGUCUUCC |
| 6057 | UAACACGCUCCACUCACAGUU | 8661 | AACUCCAAAUUGUGUCUUCCC |
| 6058 | AACACGCUCCACUCACAGUUG | 8662 | ACUCCAAAUUGUGUCUUCCCC |
| 6059 | ACACGCUCCACUCACAGUUGC | 8663 | CUCCAAAUUGUGUCUUCCCCU |
| 6060 | CACGCUCCACUCACAGUUGCU | 8664 | UCCAAAUUGUGUCUUCCCCUG |
| 6061 | ACGCUCCACUCACAGUUGCUG | 8665 | CCAAAUUGUGUCUUCCCCUGC |
| 6062 | CGCUCCACUCACAGUUGCUGU | 8666 | CAAAUUGUGUCUUCCCCUGCU |
| 6063 | GCUCCACUCACAGUUGCUGUC | 8667 | AAAUUGUGUCUUCCCCUGCUG |
| 6064 | CUCCACUCACAGUUGCUGUCU | 8668 | AAUUGUGUCUUCCCCUGCUGG |
| 6065 | UCCACUCACAGUUGCUGUCUC | 8669 | AUUGUGUCUUCCCCUGCUGGC |
| 6066 | CCACUCACAGUUGCUGUCUCC | 8670 | UUGUGUCUUCCCCUGCUGGCA |
| 6067 | CACUCACAGUUGCUGUCUCCA | 8671 | UGUGUCUUCCCCUGCUGGCAC |
| 6068 | ACUCACAGUUGCUGUCUCCAU | 8672 | GUGUCUUCCCCUGCUGGCACC |
| 6069 | CUCACAGUUGCUGUCUCCAUC | 8673 | UGUCUUCCCCUGCUGGCACCU |
| 6070 | UCACAGUUGCUGUCUCCAUCC | 8674 | GUCUUCCCCUGCUGGCACCUG |
| 6071 | CACAGUUGCUGUCUCCAUCCC | 8675 | UCUUCCCCUGCUGGCACCUGC |
| 6072 | ACAGUUGCUGUCUCCAUCCCU | 8676 | CUUCCCCUGCUGGCACCUGCU |
| 6073 | CAGUUGCUGUCUCCAUCCCUC | 8677 | UUCCCCUGCUGGCACCUGCUC |
| 6074 | AGUUGCUGUCUCCAUCCCUCA | 8678 | UCCCCUGCUGGCACCUGCUCU |
| 6075 | GUUGCUGUCUCCAUCCCUCAG | 8679 | CCCCUGCUGGCACCUGCUCUC |
| 6076 | UUGCUGUCUCCAUCCCUCAGC | 8680 | CCCUGCUGGCACCUGCUCUCA |
| 6077 | UGCUGUCUCCAUCCCUCAGCU | 8681 | CCUGCUGGCACCUGCUCUCAC |
| 6078 | GCUGUCUCCAUCCCUCAGCUG | 8682 | CUGCUGGCACCUGCUCUCACU |
| 6079 | CUGUCUCCAUCCCUCAGCUGC | 8683 | UGCUGGCACCUGCUCUCACUG |
| 6080 | UGUCUCCAUCCCUCAGCUGCA | 8684 | GCUGGCACCUGCUCUCACUGG |
| 6081 | GUCUCCAUCCCUCAGCUGCAC | 8685 | CUGGCACCUGCUCUCACUGGC |
| 6082 | UCUCCAUCCCUCAGCUGCACC | 8686 | UGGCACCUGCUCUCACUGGCA |
| 6083 | CUCCAUCCCUCAGCUGCACCU | 8687 | GGCACCUGCUCUCACUGGCAU |
| 6084 | UCCAUCCCUCAGCUGCACCUU | 8688 | GCACCUGCUCUCACUGGCAUC |
| 6085 | CCAUCCCUCAGCUGCACCUUG | 8689 | CACCUGCUCUCACUGGCAUCU |
| 6086 | CAUCCCUCAGCUGCACCUUGA | 8690 | ACCUGCUCUCACUGGCAUCUG |
| 6087 | AUCCCUCAGCUGCACCUUGAU | 8691 | CCUGCUCUCACUGGCAUCUGU |
| 6088 | UCCCUCAGCUGCACCUUGAUG | 8692 | CUGCUCUCACUGGCAUCUGUU |
| 6089 | CCCUCAGCUGCACCUUGAUGA | 8693 | UGCUCUCACUGGCAUCUGUUG |
| 6090 | CCUCAGCUGCACCUUGAUGAA | 8694 | GCUCUCACUGGCAUCUGUUGA |
| 6091 | CUCAGCUGCACCUUGAUGAAA | 8695 | CUCUCACUGGCAUCUGUUGAC |
| 6092 | UCAGCUGCACCUUGAUGAAAU | 8696 | UCUCACUGGCAUCUGUUGACA |
| 6093 | CAGCUGCACCUUGAUGAAAUU | 8697 | CUCACUGGCAUCUGUUGACAA |
| 6094 | AGCUGCACCUUGAUGAAAUUC | 8698 | UCACUGGCAUCUGUUGACAAC |
| 6095 | GCUGCACCUUGAUGAAAUUCU | 8699 | CACUGGCAUCUGUUGACAACC |
| 6096 | CUGCACCUUGAUGAAAUUCUC | 8700 | ACUGGCAUCUGUUGACAACCA |
| 6097 | UGCACCUUGAUGAAAUUCUCC | 8701 | CUGGCAUCUGUUGACAACCAC |
| 6098 | GCACCUUGAUGAAAUUCUCCA | 8702 | UGGCAUCUGUUGACAACCACA |
| 6099 | CACCUUGAUGAAAUUCUCCAU | 8703 | GGCAUCUGUUGACAACCACAG |
| 6100 | ACCUUGAUGAAAUUCUCCAUC | 8704 | GCAUCUGUUGACAACCACAGA |
| 6101 | CCUUGAUGAAAUUCUCCAUCC | 8705 | CAUCUGUUGACAACCACAGAA |
| 6102 | CUUGAUGAAAUUCUCCAUCCA | 8706 | AUCUGUUGACAACCACAGAAC |
| 6103 | UUGAUGAAAUUCUCCAUCCAA | 8707 | UCUGUUGACAACCACAGAACG |
| 6104 | UGAUGAAAUUCUCCAUCCAAA | 8708 | CUGUUGACAACCACAGAACGC |
| 6105 | GAUGAAAUUCUCCAUCCAAAA | 8709 | UGUUGACAACCACAGAACGCU |
| 6106 | AUGAAAUUCUCCAUCCAAAAA | 8710 | GUUGACAACCACAGAACGCUG |
| 6107 | UGAAAUUCUCCAUCCAAAAAG | 8711 | UUGACAACCACAGAACGCUGA |
| 6108 | GAAAUUCUCCAUCCAAAAAGG | 8712 | UGACAACCACAGAACGCUGAA |
| 6109 | AAAUUCUCCAUCCAAAAAGGG | 8713 | GACAACCACAGAACGCUGAAG |
| 6110 | AAUUCUCCAUCCAAAAAGGGU | 8714 | ACAACCACAGAACGCUGAAGC |
| 6111 | AUUCUCCAUCCAAAAAGGGUC | 8715 | CAACCACAGAACGCUGAAGCA |
| 6112 | UUCUCCAUCCAAAAAGGGUCA | 8716 | AACCACAGAACGCUGAAGCAA |
| 6113 | UCUCCAUCCAAAAAGGGUCAC | 8717 | ACCACAGAACGCUGAAGCAAA |
| 6114 | CUCCAUCCAAAAAGGGUCACA | 8718 | CCACAGAACGCUGAAGCAAAA |
| 6115 | UCCAUCCAAAAAGGGUCACAG | 8719 | CACAGAACGCUGAAGCAAAAG |
| 6116 | CCAUCCAAAAAGGGUCACAGA | 8720 | ACAGAACGCUGAAGCAAAAGC |
| 6117 | CAUCCAAAAAGGGUCACAGAU | 8721 | CAGAACGCUGAAGCAAAAGCA |
| 6118 | AUCCAAAAAGGGUCACAGAUA | 8722 | AGAACGCUGAAGCAAAAGCAA |
| 6119 | UCCAAAAAGGGUCACAGAUAC | 8723 | GAACGCUGAAGCAAAAGCAAG |
| 6120 | CCAAAAAGGGUCACAGAUACA | 8724 | AACGCUGAAGCAAAAGCAAGU |
| 6121 | CAAAAAGGGUCACAGAUACAG | 8725 | ACGCUGAAGCAAAAGCAAGUA |
| 6122 | AAAAAGGGUCACAGAUACAGC | 8726 | CGCUGAAGCAAAAGCAAGUAU |
| 6123 | AAAAGGGUCACAGAUACAGCG | 8727 | GCUGAAGCAAAAGCAAGUAUA |
| 6124 | AAAGGGUCACAGAUACAGCGU | 8728 | CUGAAGCAAAAGCAAGUAUAA |
| 6125 | AAGGGUCACAGAUACAGCGUU | 8729 | UGAAGCAAAAGCAAGUAUAAA |
| 6126 | AGGGUCACAGAUACAGCGUUU | 8730 | GAAGCAAAAGCAAGUAUAAAA |
| 6127 | GGGUCACAGAUACAGCGUUUG | 8731 | AAGCAAAAGCAAGUAUAAAAC |
| 6128 | GGUCACAGAUACAGCGUUUGG | 8732 | AGCAAAAGCAAGUAUAAAACA |
| 6129 | GUCACAGAUACAGCGUUUGGU | 8733 | GCAAAAGCAAGUAUAAAACAG |
| 6130 | UCACAGAUACAGCGUUUGGUG | 8734 | CAAAAGCAAGUAUAAAACAGG |
| 6131 | CACAGAUACAGCGUUUGGUGA | 8735 | AAAAGCAAGUAUAAAACAGGU |
| 6132 | ACAGAUACAGCGUUUGGUGAA | 8736 | AAAGCAAGUAUAAAACAGGUA |
| 6133 | CAGAUACAGCGUUUGGUGAAC | 8737 | AAGCAAGUAUAAAACAGGUAC |
| 6134 | AGAUACAGCGUUUGGUGAACG | 8738 | AGCAAGUAUAAAACAGGUACA |
| 6135 | GAUACAGCGUUUGGUGAACGA | 8739 | GCAAGUAUAAAACAGGUACAG |
| 6136 | AUACAGCGUUUGGUGAACGAG | 8740 | CAAGUAUAAAACAGGUACAGG |
| 6137 | UACAGCGUUUGGUGAACGAGU | 8741 | AAGUAUAAAACAGGUACAGGC |
| 6138 | ACAGCGUUUGGUGAACGAGUC | 8742 | AGUAUAAAACAGGUACAGGCU |
| 6139 | CAGCGUUUGGUGAACGAGUCA | 8743 | GUAUAAAACAGGUACAGGCUU |
| 6140 | AGCGUUUGGUGAACGAGUCAC | 8744 | UAUAAAACAGGUACAGGCUUC |
| 6141 | GCGUUUGGUGAACGAGUCACA | 8745 | AUAAAACAGGUACAGGCUUCU |
| 6142 | CGUUUGGUGAACGAGUCACAG | 8746 | UAAAACAGGUACAGGCUUCUC |
| 6143 | GUUUGGUGAACGAGUCACAGU | 8747 | AAAACAGGUACAGGCUUCUCA |
| 6144 | UUUGGUGAACGAGUCACAGUG | 8748 | AAACAGGUACAGGCUUCUCAA |
| 6145 | UUGGUGAACGAGUCACAGUGG | 8749 | AACAGGUACAGGCUUCUCAAC |
| 6146 | UGGUGAACGAGUCACAGUGGC | 8750 | ACAGGUACAGGCUUCUCAACC |
| 6147 | GGUGAACGAGUCACAGUGGCC | 8751 | CAGGUACAGGCUUCUCAACCA |
| 6148 | GUGAACGAGUCACAGUGGCCA | 8752 | AGGUACAGGCUUCUCAACCAC |
| 6149 | UGAACGAGUCACAGUGGCCAU | 8753 | GGUACAGGCUUCUCAACCACU |
| 6150 | GAACGAGUCACAGUGGCCAUG | 8754 | GUACAGGCUUCUCAACCACUU |
| 6151 | AACGAGUCACAGUGGCCAUGG | 8755 | UACAGGCUUCUCAACCACUUC |
| 6152 | ACGAGUCACAGUGGCCAUGGU | 8756 | ACAGGCUUCUCAACCACUUCG |
| 6153 | CGAGUCACAGUGGCCAUGGUC | 8757 | CAGGCUUCUCAACCACUUCGC |
| 6154 | GAGUCACAGUGGCCAUGGUCG | 8758 | AGGCUUCUCAACCACUUCGCA |
| 6155 | AGUCACAGUGGCCAUGGUCGG | 8759 | GGCUUCUCAACCACUUCGCAG |
| 6156 | GUCACAGUGGCCAUGGUCGGA | 8760 | GCUUCUCAACCACUUCGCAGA |
| 6157 | UCACAGUGGCCAUGGUCGGAA | 8761 | CUUCUCAACCACUUCGCAGAU |
| 6158 | CACAGUGGCCAUGGUCGGAAC | 8762 | UUCUCAACCACUUCGCAGAUG |
| 6159 | ACAGUGGCCAUGGUCGGAACA | 8763 | UCUCAACCACUUCGCAGAUGU |
| 6160 | CAGUGGCCAUGGUCGGAACAG | 8764 | CUCAACCACUUCGCAGAUGUC |
| 6161 | AGUGGCCAUGGUCGGAACAGU | 8765 | UCAACCACUUCGCAGAUGUCU |
| 6162 | GUGGCCAUGGUCGGAACAGUU | 8766 | CAACCACUUCGCAGAUGUCUG |
| 6163 | UGGCCAUGGUCGGAACAGUUC | 8767 | AACCACUUCGCAGAUGUCUGC |
| 6164 | GGCCAUGGUCGGAACAGUUCA | 8768 | ACCACUUCGCAGAUGUCUGCC |
| 6165 | GCCAUGGUCGGAACAGUUCAG | 8769 | CCACUUCGCAGAUGUCUGCCA |
| 6166 | CCAUGGUCGGAACAGUUCAGC | 8770 | CACUUCGCAGAUGUCUGCCAA |
| 6167 | CAUGGUCGGAACAGUUCAGCU | 8771 | ACUUCGCAGAUGUCUGCCAAU |
| 6168 | AUGGUCGGAACAGUUCAGCUG | 8772 | CUUCGCAGAUGUCUGCCAAUA |
| 6169 | UGGUCGGAACAGUUCAGCUGA | 8773 | UUCGCAGAUGUCUGCCAAUAA |
| 6170 | GGUCGGAACAGUUCAGCUGAC | 8774 | UCGCAGAUGUCUGCCAAUAAU |
| 6171 | GUCGGAACAGUUCAGCUGACA | 8775 | CGCAGAUGUCUGCCAAUAAUA |
| 6172 | UCGGAACAGUUCAGCUGACAU | 8776 | GCAGAUGUCUGCCAAUAAUAU |
| 6173 | CGGAACAGUUCAGCUGACAUG | 8777 | CAGAUGUCUGCCAAUAAUAUC |
| 6174 | GGAACAGUUCAGCUGACAUGU | 8778 | AGAUGUCUGCCAAUAAUAUCC |
| 6175 | GAACAGUUCAGCUGACAUGUG | 8779 | GAUGUCUGCCAAUAAUAUCCU |
| 6176 | AACAGUUCAGCUGACAUGUGA | 8780 | AUGUCUGCCAAUAAUAUCCUG |
| 6177 | ACAGUUCAGCUGACAUGUGAC | 8781 | UGUCUGCCAAUAAUAUCCUGA |
| 6178 | CAGUUCAGCUGACAUGUGACA | 8782 | GUCUGCCAAUAAUAUCCUGAU |
| 6179 | AGUUCAGCUGACAUGUGACAG | 8783 | UCUGCCAAUAAUAUCCUGAUA |
| 6180 | GUUCAGCUGACAUGUGACAGU | 8784 | CUGCCAAUAAUAUCCUGAUAA |
| 6181 | UUCAGCUGACAUGUGACAGUG | 8785 | UGCCAAUAAUAUCCUGAUAAA |
| 6182 | UCAGCUGACAUGUGACAGUGU | 8786 | GCCAAUAAUAUCCUGAUAAAA |
| 6183 | CAGCUGACAUGUGACAGUGUU | 8787 | CCAAUAAUAUCCUGAUAAAAU |
| 6184 | AGCUGACAUGUGACAGUGUUG | 8788 | CAAUAAUAUCCUGAUAAAAUC |
| 6185 | GCUGACAUGUGACAGUGUUGA | 8789 | AAUAAUAUCCUGAUAAAAUCC |
| 6186 | CUGACAUGUGACAGUGUUGAC | 8790 | AUAAUAUCCUGAUAAAAUCCA |
| 6187 | UGACAUGUGACAGUGUUGACU | 8791 | UAAUAUCCUGAUAAAAUCCAG |
| 6188 | GACAUGUGACAGUGUUGACUU | 8792 | AAUAUCCUGAUAAAAUCCAGG |
| 6189 | ACAUGUGACAGUGUUGACUUC | 8793 | AUAUCCUGAUAAAAUCCAGGA |
| 6190 | CAUGUGACAGUGUUGACUUCC | 8794 | UAUCCUGAUAAAAUCCAGGAA |
| 6191 | AUGUGACAGUGUUGACUUCCA | 8795 | AUCCUGAUAAAAUCCAGGAAG |
| 6192 | UGUGACAGUGUUGACUUCCAA | 8796 | UCCUGAUAAAAUCCAGGAAGC |
| 6193 | GUGACAGUGUUGACUUCCAAG | 8797 | CCUGAUAAAAUCCAGGAAGCA |
| 6194 | UGACAGUGUUGACUUCCAAGG | 8798 | CUGAUAAAAUCCAGGAAGCAG |
| 6195 | GACAGUGUUGACUUCCAAGGC | 8799 | UGAUAAAAUCCAGGAAGCAGG |
| 6196 | ACAGUGUUGACUUCCAAGGCU | 8800 | GAUAAAAUCCAGGAAGCAGGA |
| 6197 | CAGUGUUGACUUCCAAGGCUC | 8801 | AUAAAAUCCAGGAAGCAGGAU |
| 6198 | AGUGUUGACUUCCAAGGCUCU | 8802 | UAAAAUCCAGGAAGCAGGAUU |
| 6199 | GUGUUGACUUCCAAGGCUCUG | 8803 | AAAAUCCAGGAAGCAGGAUUU |
| 6200 | UGUUGACUUCCAAGGCUCUGA | 8804 | AAAUCCAGGAAGCAGGAUUUG |
| 6201 | GUUGACUUCCAAGGCUCUGAA | 8805 | AAUCCAGGAAGCAGGAUUUGG |
| 6202 | UUGACUUCCAAGGCUCUGAAU | 8806 | AUCCAGGAAGCAGGAUUUGGC |
| 6203 | UGACUUCCAAGGCUCUGAAUA | 8807 | UCCAGGAAGCAGGAUUUGGCU |
| 6204 | GACUUCCAAGGCUCUGAAUAU | 8808 | CCAGGAAGCAGGAUUUGGCUU |
| 6205 | ACUUCCAAGGCUCUGAAUAUC | 8809 | CAGGAAGCAGGAUUUGGCUUG |
| 6206 | CUUCCAAGGCUCUGAAUAUCA | 8810 | AGGAAGCAGGAUUUGGCUUGA |
| 6207 | UUCCAAGGCUCUGAAUAUCAA | 8811 | GGAAGCAGGAUUUGGCUUGAC |
| 6208 | UCCAAGGCUCUGAAUAUCAAA | 8812 | GAAGCAGGAUUUGGCUUGACU |
| 6209 | CCAAGGCUCUGAAUAUCAAAA | 8813 | AAGCAGGAUUUGGCUUGACUC |
| 6210 | CAAGGCUCUGAAUAUCAAAAA | 8814 | AGCAGGAUUUGGCUUGACUCC |
| 6211 | AAGGCUCUGAAUAUCAAAAAG | 8815 | GCAGGAUUUGGCUUGACUCCC |
| 6212 | AGGCUCUGAAUAUCAAAAAGU | 8816 | CAGGAUUUGGCUUGACUCCCA |
| 6213 | GGCUCUGAAUAUCAAAAAGUC | 8817 | AGGAUUUGGCUUGACUCCCAG |
| 6214 | GCUCUGAAUAUCAAAAAGUCU | 8818 | GGAUUUGGCUUGACUCCCAGC |
| 6215 | CUCUGAAUAUCAAAAAGUCUG | 8819 | GAUUUGGCUUGACUCCCAGCC |
| 6216 | UCUGAAUAUCAAAAAGUCUGC | 8820 | AUUUGGCUUGACUCCCAGCCU |
| 6217 | CUGAAUAUCAAAAAGUCUGCC | 8821 | UUUGGCUUGACUCCCAGCCUC |
| 6218 | UGAAUAUCAAAAAGUCUGCCU | 8822 | UUGGCUUGACUCCCAGCCUCU |
| 6219 | GAAUAUCAAAAAGUCUGCCUU | 8823 | UGGCUUGACUCCCAGCCUCUU |
| 6220 | AAUAUCAAAAAGUCUGCCUUU | 8824 | GGCUUGACUCCCAGCCUCUUC |
| 6221 | AUAUCAAAAAGUCUGCCUUUU | 8825 | GCUUGACUCCCAGCCUCUUCU |
| 6222 | UAUCAAAAAGUCUGCCUUUUG | 8826 | CUUGACUCCCAGCCUCUUCUC |
| 6223 | AUCAAAAAGUCUGCCUUUUGC | 8827 | UUGACUCCCAGCCUCUUCUCC |
| 6224 | UCAAAAAGUCUGCCUUUUGCU | 8828 | UGACUCCCAGCCUCUUCUCCA |
| 6225 | CAAAAAGUCUGCCUUUUGCUU | 8829 | GACUCCCAGCCUCUUCUCCAU |
| 6226 | AAAAAGUCUGCCUUUUGCUUC | 8830 | ACUCCCAGCCUCUUCUCCAUG |
| 6227 | AAAAGUCUGCCUUUUGCUUCC | 8831 | CUCCCAGCCUCUUCUCCAUGG |
| 6228 | AAAGUCUGCCUUUUGCUUCCG | 8832 | UCCCAGCCUCUUCUCCAUGGC |
| 6229 | AAGUCUGCCUUUUGCUUCCGC | 8833 | CCCAGCCUCUUCUCCAUGGCC |
| 6230 | AGUCUGCCUUUUGCUUCCGCA | 8834 | CCAGCCUCUUCUCCAUGGCCC |
| 6231 | GUCUGCCUUUUGCUUCCGCAG | 8835 | CAGCCUCUUCUCCAUGGCCCU |
| 6232 | UCUGCCUUUUGCUUCCGCAGC | 8836 | AGCCUCUUCUCCAUGGCCCUC |
| 6233 | CUGCCUUUUGCUUCCGCAGCU | 8837 | GCCUCUUCUCCAUGGCCCUCC |
| 6234 | UGCCUUUUGCUUCCGCAGCUC | 8838 | CCUCUUCUCCAUGGCCCUCCA |
| 6235 | GCCUUUUGCUUCCGCAGCUCA | 8839 | CUCUUCUCCAUGGCCCUCCAG |
| 6236 | CCUUUUGCUUCCGCAGCUCAC | 8840 | UCUUCUCCAUGGCCCUCCAGA |
| 6237 | CUUUUGCUUCCGCAGCUCACU | 8841 | CUUCUCCAUGGCCCUCCAGAC |
| 6238 | UUUUGCUUCCGCAGCUCACUC | 8842 | UUCUCCAUGGCCCUCCAGACA |
| 6239 | UUUGCUUCCGCAGCUCACUCU | 8843 | UCUCCAUGGCCCUCCAGACAG |
| 6240 | UUGCUUCCGCAGCUCACUCUU | 8844 | CUCCAUGGCCCUCCAGACAGG |
| 6241 | UGCUUCCGCAGCUCACUCUUG | 8845 | UCCAUGGCCCUCCAGACAGGC |
| 6242 | GCUUCCGCAGCUCACUCUUGA | 8846 | CCAUGGCCCUCCAGACAGGCA |
| 6243 | CUUCCGCAGCUCACUCUUGAG | 8847 | CAUGGCCCUCCAGACAGGCAG |
| 6244 | UUCCGCAGCUCACUCUUGAGC | 8848 | AUGGCCCUCCAGACAGGCAGA |
| 6245 | UCCGCAGCUCACUCUUGAGCA | 8849 | UGGCCCUCCAGACAGGCAGAA |
| 6246 | CCGCAGCUCACUCUUGAGCAU | 8850 | GGCCCUCCAGACAGGCAGAAC |
| 6247 | CGCAGCUCACUCUUGAGCAUC | 8851 | GCCCUCCAGACAGGCAGAACC |
| 6248 | GCAGCUCACUCUUGAGCAUCG | 8852 | CCCUCCAGACAGGCAGAACCA |
| 6249 | CAGCUCACUCUUGAGCAUCGC | 8853 | CCUCCAGACAGGCAGAACCAG |
| 6250 | AGCUCACUCUUGAGCAUCGCU | 8854 | CUCCAGACAGGCAGAACCAGU |
| 6251 | GCUCACUCUUGAGCAUCGCUG | 8855 | UCCAGACAGGCAGAACCAGUA |
| 6252 | CUCACUCUUGAGCAUCGCUGC | 8856 | CCAGACAGGCAGAACCAGUAC |
| 6253 | UCACUCUUGAGCAUCGCUGCC | 8857 | CAGACAGGCAGAACCAGUACA |
| 6254 | CACUCUUGAGCAUCGCUGCCA | 8858 | AGACAGGCAGAACCAGUACAC |
| 6255 | ACUCUUGAGCAUCGCUGCCAC | 8859 | GACAGGCAGAACCAGUACACG |
| 6256 | CUCUUGAGCAUCGCUGCCACC | 8860 | ACAGGCAGAACCAGUACACGG |
| 6257 | UCUUGAGCAUCGCUGCCACCU | 8861 | CAGGCAGAACCAGUACACGGG |
| 6258 | CUUGAGCAUCGCUGCCACCUC | 8862 | AGGCAGAACCAGUACACGGGG |
| 6259 | UUGAGCAUCGCUGCCACCUCA | 8863 | GGCAGAACCAGUACACGGGGC |
| 6260 | UGAGCAUCGCUGCCACCUCAU | 8864 | GCAGAACCAGUACACGGGGCU |
| 6261 | GAGCAUCGCUGCCACCUCAUG | 8865 | CAGAACCAGUACACGGGGCUC |
| 6262 | AGCAUCGCUGCCACCUCAUGG | 8866 | AGAACCAGUACACGGGGCUCA |
| 6263 | GCAUCGCUGCCACCUCAUGGC | 8867 | GAACCAGUACACGGGGCUCAG |
| 6264 | CAUCGCUGCCACCUCAUGGCC | 8868 | AACCAGUACACGGGGCUCAGG |
| 6265 | AUCGCUGCCACCUCAUGGCCU | 8869 | ACCAGUACACGGGGCUCAGGG |
| 6266 | UCGCUGCCACCUCAUGGCCUU | 8870 | CCAGUACACGGGGCUCAGGGC |
| 6267 | CGCUGCCACCUCAUGGCCUUU | 8871 | CAGUACACGGGGCUCAGGGCC |
| 6268 | GCUGCCACCUCAUGGCCUUUG | 8872 | AGUACACGGGGCUCAGGGCCA |
| 6269 | CUGCCACCUCAUGGCCUUUGA | 8873 | GUACACGGGGCUCAGGGCCAC |
| 6270 | UGCCACCUCAUGGCCUUUGAA | 8874 | UACACGGGGCUCAGGGCCACA |
| 6271 | GCCACCUCAUGGCCUUUGAAG | 8875 | ACACGGGGCUCAGGGCCACAU |
| 6272 | CCACCUCAUGGCCUUUGAAGA | 8876 | CACGGGGCUCAGGGCCACAUA |
| 6273 | CACCUCAUGGCCUUUGAAGAU | 8877 | ACGGGGCUCAGGGCCACAUAG |
| 6274 | ACCUCAUGGCCUUUGAAGAUC | 8878 | CGGGGCUCAGGGCCACAUAGC |
| 6275 | CCUCAUGGCCUUUGAAGAUCU | 8879 | GGGGCUCAGGGCCACAUAGCG |
| 6276 | CUCAUGGCCUUUGAAGAUCUG | 8880 | GGGCUCAGGGCCACAUAGCGG |
| 6277 | UCAUGGCCUUUGAAGAUCUGG | 8881 | GGCUCAGGGCCACAUAGCGGG |
| 6278 | CAUGGCCUUUGAAGAUCUGGU | 8882 | GCUCAGGGCCACAUAGCGGGG |
| 6279 | AUGGCCUUUGAAGAUCUGGUG | 8883 | CUCAGGGCCACAUAGCGGGGC |
| 6280 | UGGCCUUUGAAGAUCUGGUGG | 8884 | UCAGGGCCACAUAGCGGGGCC |
| 6281 | GGCCUUUGAAGAUCUGGUGGG | 8885 | CAGGGCCACAUAGCGGGGCCC |
| 6282 | GCCUUUGAAGAUCUGGUGGGG | 8886 | AGGGCCACAUAGCGGGGCCCC |
| 6283 | CCUUUGAAGAUCUGGUGGGGA | 8887 | GGGCCACAUAGCGGGGCCCCG |
| 6284 | CUUUGAAGAUCUGGUGGGGAG | 8888 | GGCCACAUAGCGGGGCCCCGG |
| 6285 | UUUGAAGAUCUGGUGGGGAGG | 8889 | GCCACAUAGCGGGGCCCCGGC |
| 6286 | UUGAAGAUCUGGUGGGGAGGC | 8890 | CCACAUAGCGGGGCCCCGGCU |
| 6287 | UGAAGAUCUGGUGGGGAGGCU | 8891 | CACAUAGCGGGGCCCCGGCUC |
| 6288 | GAAGAUCUGGUGGGGAGGCUC | 8892 | ACAUAGCGGGGCCCCGGCUCU |
| 6289 | AAGAUCUGGUGGGGAGGCUCG | 8893 | CAUAGCGGGGCCCCGGCUCUC |
| 6290 | AGAUCUGGUGGGGAGGCUCGU | 8894 | AUAGCGGGGCCCCGGCUCUCG |
| 6291 | GAUCUGGUGGGGAGGCUCGUU | 8895 | UAGCGGGGCCCCGGCUCUCGG |
| 6292 | AUCUGGUGGGGAGGCUCGUUU | 8896 | AGCGGGGCCCCGGCUCUCGGC |
| 6293 | UCUGGUGGGGAGGCUCGUUUU | 8897 | GCGGGGCCCCGGCUCUCGGCG |
| 6294 | CUGGUGGGGAGGCUCGUUUUG | 8898 | CGGGGCCCCGGCUCUCGGCGG |
| 6295 | UGGUGGGGAGGCUCGUUUUGA | 8899 | GGGGCCCCGGCUCUCGGCGGC |
| 6296 | GGUGGGGAGGCUCGUUUUGAA | 8900 | GGGCCCCGGCUCUCGGCGGCC |
| 6297 | GUGGGGAGGCUCGUUUUGAAC | 8901 | GGCCCCGGCUCUCGGCGGCCU |
| 6298 | UGGGGAGGCUCGUUUUGAACA | 8902 | GCCCCGGCUCUCGGCGGCCUC |
| 6299 | GGGGAGGCUCGUUUUGAACAA | 8903 | CCCCGGCUCUCGGCGGCCUCC |
| 6300 | GGGAGGCUCGUUUUGAACAAA | 8904 | CCCGGCUCUCGGCGGCCUCCG |
| 6301 | GGAGGCUCGUUUUGAACAAAA | 8905 | CCGGCUCUCGGCGGCCUCCGC |
| 6302 | GAGGCUCGUUUUGAACAAAAA | 8906 | CGGCUCUCGGCGGCCUCCGCC |
| 6303 | AGGCUCGUUUUGAACAAAAAA | 8907 | GGCUCUCGGCGGCCUCCGCCU |
| 6304 | GGCUCGUUUUGAACAAAAAAU | 8908 | GCUCUCGGCGGCCUCCGCCUC |
| 6305 | GCUCGUUUUGAACAAAAAAUA | 8909 | CUCUCGGCGGCCUCCGCCUCC |
| 6306 | CUCGUUUUGAACAAAAAAUAC | 8910 | UCUCGGCGGCCUCCGCCUCCU |
| 6307 | UCGUUUUGAACAAAAAAUACC | 8911 | CUCGGCGGCCUCCGCCUCCUC |
| 6308 | CGUUUUGAACAAAAAAUACCA | 8912 | UCGGCGGCCUCCGCCUCCUCC |
| 6309 | GUUUUGAACAAAAAAUACCAU | 8913 | CGGCGGCCUCCGCCUCCUCCU |
| 6310 | UUUUGAACAAAAAAUACCAUU | 8914 | GGCGGCCUCCGCCUCCUCCUG |
| 6311 | UUUGAACAAAAAAUACCAUUU | 8915 | GCGGCCUCCGCCUCCUCCUGG |
| 6312 | UUGAACAAAAAAUACCAUUUU | 8916 | CGGCCUCCGCCUCCUCCUGGU |
| 6313 | UGAACAAAAAAUACCAUUUUG | 8917 | GGCCUCCGCCUCCUCCUGGUC |
| 6314 | GAACAAAAAAUACCAUUUUGG | 8918 | GCCUCCGCCUCCUCCUGGUCC |
| 6315 | AACAAAAAAUACCAUUUUGGU | 8919 | CCUCCGCCUCCUCCUGGUCCA |
| 6316 | ACAAAAAAUACCAUUUUGGUG | 8920 | CUCCGCCUCCUCCUGGUCCAU |
| 6317 | CAAAAAAUACCAUUUUGGUGC | 8921 | UCCGCCUCCUCCUGGUCCAUG |
| 6318 | AAAAAAUACCAUUUUGGUGCU | 8922 | CCGCCUCCUCCUGGUCCAUGG |
| 6319 | AAAAAUACCAUUUUGGUGCUC | 8923 | CGCCUCCUCCUGGUCCAUGGG |
| 6320 | AAAAUACCAUUUUGGUGCUCU | 8924 | GCCUCCUCCUGGUCCAUGGGC |
| 6321 | AAAUACCAUUUUGGUGCUCUG | 8925 | CCUCCUCCUGGUCCAUGGGCU |
| 6322 | AAUACCAUUUUGGUGCUCUGC | 8926 | CUCCUCCUGGUCCAUGGGCUC |
| 6323 | AUACCAUUUUGGUGCUCUGCU | 8927 | UCCUCCUGGUCCAUGGGCUCG |
| 6324 | UACCAUUUUGGUGCUCUGCUC | 8928 | CCUCCUGGUCCAUGGGCUCGG |
| 6325 | ACCAUUUUGGUGCUCUGCUCC | 8929 | CUCCUGGUCCAUGGGCUCGGG |
| 6326 | CCAUUUUGGUGCUCUGCUCCG | 8930 | UCCUGGUCCAUGGGCUCGGGG |
| 6327 | CAUUUUGGUGCUCUGCUCCGU | 8931 | CCUGGUCCAUGGGCUCGGGGA |
| 6328 | AUUUUGGUGCUCUGCUCCGUG | 8932 | CUGGUCCAUGGGCUCGGGGAC |
| 6329 | UUUUGGUGCUCUGCUCCGUGU | 8933 | UGGUCCAUGGGCUCGGGGACC |
| 6330 | UUUGGUGCUCUGCUCCGUGUA | 8934 | GGUCCAUGGGCUCGGGGACCC |
| 6331 | UUGGUGCUCUGCUCCGUGUAC | 8935 | GUCCAUGGGCUCGGGGACCCC |
| 6332 | UGGUGCUCUGCUCCGUGUACG | 8936 | UCCAUGGGCUCGGGGACCCCC |
| 6333 | GGUGCUCUGCUCCGUGUACGG | 8937 | CCAUGGGCUCGGGGACCCCCA |
| 6334 | GUGCUCUGCUCCGUGUACGGC | 8938 | CAUGGGCUCGGGGACCCCCAA |
| 6335 | UGCUCUGCUCCGUGUACGGCU | 8939 | AUGGGCUCGGGGACCCCCAAC |
| 6336 | GCUCUGCUCCGUGUACGGCUG | 8940 | UGGGCUCGGGGACCCCCAACC |
| 6337 | CUCUGCUCCGUGUACGGCUGA | 8941 | GGGCUCGGGGACCCCCAACCU |
| 6338 | UCUGCUCCGUGUACGGCUGAA | 8942 | GGCUCGGGGACCCCCAACCUU |
| 6339 | CUGCUCCGUGUACGGCUGAAU | 8943 | GCUCGGGGACCCCCAACCUUC |
| 6340 | UGCUCCGUGUACGGCUGAAUC | 8944 | CUCGGGGACCCCCAACCUUCG |
| 6341 | GCUCCGUGUACGGCUGAAUCU | 8945 | UCGGGGACCCCCAACCUUCGC |
| 6342 | CUCCGUGUACGGCUGAAUCUU | 8946 | CGGGGACCCCCAACCUUCGCU |
| 6343 | UCCGUGUACGGCUGAAUCUUU | 8947 | GGGGACCCCCAACCUUCGCUC |
| 6344 | CCGUGUACGGCUGAAUCUUUU | 8948 | GGGACCCCCAACCUUCGCUCC |
| 6345 | CGUGUACGGCUGAAUCUUUUG | 8949 | GGACCCCCAACCUUCGCUCCC |
| 6346 | GUGUACGGCUGAAUCUUUUGC | 8950 | GACCCCCAACCUUCGCUCCCC |
| 6347 | UGUACGGCUGAAUCUUUUGCA | 8951 | ACCCCCAACCUUCGCUCCCCU |
| 6348 | GUACGGCUGAAUCUUUUGCAC | 8952 | CCCCCAACCUUCGCUCCCCUC |
| 6349 | UACGGCUGAAUCUUUUGCACA | 8953 | CCCCAACCUUCGCUCCCCUCA |
| 6350 | ACGGCUGAAUCUUUUGCACAA | 8954 | CCCAACCUUCGCUCCCCUCAC |
| 6351 | CGGCUGAAUCUUUUGCACAAU | 8955 | CCAACCUUCGCUCCCCUCACC |
| 6352 | GGCUGAAUCUUUUGCACAAUG | 8956 | CAACCUUCGCUCCCCUCACCC |
| 6353 | GCUGAAUCUUUUGCACAAUGA | 8957 | AACCUUCGCUCCCCUCACCCG |
| 6354 | CUGAAUCUUUUGCACAAUGAU | 8958 | ACCUUCGCUCCCCUCACCCGG |
| 6355 | UGAAUCUUUUGCACAAUGAUG | 8959 | CCUUCGCUCCCCUCACCCGGA |
| 6356 | GAAUCUUUUGCACAAUGAUGU | 8960 | CUUCGCUCCCCUCACCCGGAG |
| 6357 | AAUCUUUUGCACAAUGAUGUC | 8961 | UUCGCUCCCCUCACCCGGAGG |
| 6358 | AUCUUUUGCACAAUGAUGUCG | 8962 | UCGCUCCCCUCACCCGGAGGA |
| 6359 | UCUUUUGCACAAUGAUGUCGG | 8963 | CGCUCCCCUCACCCGGAGGAG |
| 6360 | CUUUUGCACAAUGAUGUCGGA | 8964 | GCUCCCCUCACCCGGAGGAGG |
| 6361 | UUUUGCACAAUGAUGUCGGAA | 8965 | CUCCCCUCACCCGGAGGAGGA |
| 6362 | UUUGCACAAUGAUGUCGGAAU | 8966 | UCCCCUCACCCGGAGGAGGAG |
| 6363 | UUGCACAAUGAUGUCGGAAUC | 8967 | CCCCUCACCCGGAGGAGGAGG |
| 6364 | UGCACAAUGAUGUCGGAAUCC | 8968 | CCCUCACCCGGAGGAGGAGGA |
| 6365 | GCACAAUGAUGUCGGAAUCCA | 8969 | CCUCACCCGGAGGAGGAGGAG |
| 6366 | CACAAUGAUGUCGGAAUCCAG | 8970 | CUCACCCGGAGGAGGAGGAGG |
| 6367 | ACAAUGAUGUCGGAAUCCAGC | 8971 | UCACCCGGAGGAGGAGGAGGA |
| 6368 | CAAUGAUGUCGGAAUCCAGCA | 8972 | CACCCGGAGGAGGAGGAGGAA |
| 6369 | AAUGAUGUCGGAAUCCAGCAC | 8973 | ACCCGGAGGAGGAGGAGGAAG |
| 6370 | AUGAUGUCGGAAUCCAGCACC | 8974 | CCCGGAGGAGGAGGAGGAAGA |
| 6371 | UGAUGUCGGAAUCCAGCACCC | 8975 | CCGGAGGAGGAGGAGGAAGAG |
| 6372 | GAUGUCGGAAUCCAGCACCCC | 8976 | CGGAGGAGGAGGAGGAAGAGG |
| 6373 | AUGUCGGAAUCCAGCACCCCC | 8977 | GGAGGAGGAGGAGGAAGAGGA |
| 6374 | UGUCGGAAUCCAGCACCCCCA | 8978 | GAGGAGGAGGAGGAAGAGGAA |
| 6375 | GUCGGAAUCCAGCACCCCCAG | 8979 | AGGAGGAGGAGGAAGAGGAAG |
| 6376 | UCGGAAUCCAGCACCCCCAGG | 8980 | GGAGGAGGAGGAAGAGGAAGA |
| 6377 | CGGAAUCCAGCACCCCCAGGA | 8981 | GAGGAGGAGGAAGAGGAAGAA |
| 6378 | GGAAUCCAGCACCCCCAGGAG | 8982 | AGGAGGAGGAAGAGGAAGAAG |
| 6379 | GAAUCCAGCACCCCCAGGAGG | 8983 | GGAGGAGGAAGAGGAAGAAGG |
| 6380 | AAUCCAGCACCCCCAGGAGGA | 8984 | GAGGAGGAAGAGGAAGAAGGU |
| 6381 | AUCCAGCACCCCCAGGAGGAC | 8985 | AGGAGGAAGAGGAAGAAGGUA |
| 6382 | UCCAGCACCCCCAGGAGGACC | 8986 | GGAGGAAGAGGAAGAAGGUAG |
| 6383 | CCAGCACCCCCAGGAGGACCC | 8987 | GAGGAAGAGGAAGAAGGUAGU |
| 6384 | CAGCACCCCCAGGAGGACCCC | 8988 | AGGAAGAGGAAGAAGGUAGUG |
| 6385 | AGCACCCCCAGGAGGACCCCA | 8989 | GGAAGAGGAAGAAGGUAGUGC |
| 6386 | GCACCCCCAGGAGGACCCCAA | 8990 | GAAGAGGAAGAAGGUAGUGCG |
| 6387 | CACCCCCAGGAGGACCCCAAU | 8991 | AAGAGGAAGAAGGUAGUGCGG |
| 6388 | ACCCCCAGGAGGACCCCAAUC | 8992 | AGAGGAAGAAGGUAGUGCGGG |
| 6389 | CCCCCAGGAGGACCCCAAUCU | 8993 | GAGGAAGAAGGUAGUGCGGGC |
| 6390 | CCCCAGGAGGACCCCAAUCUG | 8994 | AGGAAGAAGGUAGUGCGGGCU |
| 6391 | CCCAGGAGGACCCCAAUCUGG | 8995 | GGAAGAAGGUAGUGCGGGCUC |
| 6392 | CCAGGAGGACCCCAAUCUGGC | 8996 | GAAGAAGGUAGUGCGGGCUCC |
| 6393 | CAGGAGGACCCCAAUCUGGCG | 8997 | AAGAAGGUAGUGCGGGCUCCC |
| 6394 | AGGAGGACCCCAAUCUGGCGG | 8998 | AGAAGGUAGUGCGGGCUCCCC |
| 6395 | GGAGGACCCCAAUCUGGCGGA | 8999 | GAAGGUAGUGCGGGCUCCCCA |
| 6396 | GAGGACCCCAAUCUGGCGGAU | 9000 | AAGGUAGUGCGGGCUCCCCAC |
| 6397 | AGGACCCCAAUCUGGCGGAUG | 9001 | AGGUAGUGCGGGCUCCCCACC |
| 6398 | GGACCCCAAUCUGGCGGAUGA | 9002 | GGUAGUGCGGGCUCCCCACCC |
| 6399 | GACCCCAAUCUGGCGGAUGAA | 9003 | GUAGUGCGGGCUCCCCACCCG |
| 6400 | ACCCCAAUCUGGCGGAUGAAC | 9004 | UAGUGCGGGCUCCCCACCCGG |
| 6401 | CCCCAAUCUGGCGGAUGAACA | 9005 | AGUGCGGGCUCCCCACCCGGA |
| 6402 | CCCAAUCUGGCGGAUGAACAU | 9006 | GUGCGGGCUCCCCACCCGGAC |
| 6403 | CCAAUCUGGCGGAUGAACAUC | 9007 | UGCGGGCUCCCCACCCGGACA |
| 6404 | CAAUCUGGCGGAUGAACAUCC | 9008 | GCGGGCUCCCCACCCGGACAG |
| 6405 | AAUCUGGCGGAUGAACAUCCC | 9009 | CGGGCUCCCCACCCGGACAGC |
| 6406 | AUCUGGCGGAUGAACAUCCCC | 9010 | GGGCUCCCCACCCGGACAGCU |
| 6407 | UCUGGCGGAUGAACAUCCCCU | 9011 | GGCUCCCCACCCGGACAGCUA |
| 6408 | CUGGCGGAUGAACAUCCCCUU | 9012 | GCUCCCCACCCGGACAGCUAC |
| 6409 | UGGCGGAUGAACAUCCCCUUC | 9013 | CUCCCCACCCGGACAGCUACC |
| 6410 | GGCGGAUGAACAUCCCCUUCA | 9014 | UCCCCACCCGGACAGCUACCU |
| 6411 | GCGGAUGAACAUCCCCUUCAG | 9015 | CCCCACCCGGACAGCUACCUC |
| 6412 | CGGAUGAACAUCCCCUUCAGC | 9016 | CCCACCCGGACAGCUACCUCU |
| 6413 | GGAUGAACAUCCCCUUCAGCC | 9017 | CCACCCGGACAGCUACCUCUC |
| 6414 | GAUGAACAUCCCCUUCAGCCU | 9018 | CACCCGGACAGCUACCUCUCG |
| 6415 | AUGAACAUCCCCUUCAGCCUC | 9019 | ACCCGGACAGCUACCUCUCGC |
| 6416 | UGAACAUCCCCUUCAGCCUCU | 9020 | CCCGGACAGCUACCUCUCGCC |
| 6417 | GAACAUCCCCUUCAGCCUCUC | 9021 | CCGGACAGCUACCUCUCGCCU |
| 6418 | AACAUCCCCUUCAGCCUCUCA | 9022 | CGGACAGCUACCUCUCGCCUC |
| 6419 | ACAUCCCCUUCAGCCUCUCAG | 9023 | GGACAGCUACCUCUCGCCUCA |
| 6420 | CAUCCCCUUCAGCCUCUCAGU | 9024 | GACAGCUACCUCUCGCCUCAG |
| 6421 | AUCCCCUUCAGCCUCUCAGUU | 9025 | ACAGCUACCUCUCGCCUCAGC |
| 6422 | UCCCCUUCAGCCUCUCAGUUA | 9026 | CAGCUACCUCUCGCCUCAGCC |
| 6423 | CCCCUUCAGCCUCUCAGUUAG | 9027 | AGCUACCUCUCGCCUCAGCCU |
| 6424 | CCCUUCAGCCUCUCAGUUAGC | 9028 | GCUACCUCUCGCCUCAGCCUC |
| 6425 | CCUUCAGCCUCUCAGUUAGCU | 9029 | CUACCUCUCGCCUCAGCCUCC |
| 6426 | CUUCAGCCUCUCAGUUAGCUG | 9030 | UACCUCUCGCCUCAGCCUCCC |
| 6427 | UUCAGCCUCUCAGUUAGCUGA | 9031 | ACCUCUCGCCUCAGCCUCCCU |
| 6428 | UCAGCCUCUCAGUUAGCUGAC | 9032 | CCUCUCGCCUCAGCCUCCCUG |
| 6429 | CAGCCUCUCAGUUAGCUGACU | 9033 | CUCUCGCCUCAGCCUCCCUGG |
| 6430 | AGCCUCUCAGUUAGCUGACUG | 9034 | UCUCGCCUCAGCCUCCCUGGA |
| 6431 | GCCUCUCAGUUAGCUGACUGA | 9035 | CUCGCCUCAGCCUCCCUGGAC |
| 6432 | CCUCUCAGUUAGCUGACUGAC | 9036 | UCGCCUCAGCCUCCCUGGACA |
| 6433 | CUCUCAGUUAGCUGACUGACG | 9037 | CGCCUCAGCCUCCCUGGACAG |
| 6434 | UCUCAGUUAGCUGACUGACGU | 9038 | GCCUCAGCCUCCCUGGACAGC |
| 6435 | CUCAGUUAGCUGACUGACGUU | 9039 | CCUCAGCCUCCCUGGACAGCG |
| 6436 | UCAGUUAGCUGACUGACGUUG | 9040 | CUCAGCCUCCCUGGACAGCGA |
| 6437 | CAGUUAGCUGACUGACGUUGA | 9041 | UCAGCCUCCCUGGACAGCGAC |
| 6438 | AGUUAGCUGACUGACGUUGAU | 9042 | CAGCCUCCCUGGACAGCGACG |
| 6439 | GUUAGCUGACUGACGUUGAUA | 9043 | AGCCUCCCUGGACAGCGACGG |
| 6440 | UUAGCUGACUGACGUUGAUAU | 9044 | GCCUCCCUGGACAGCGACGGC |
| 6441 | UAGCUGACUGACGUUGAUAUC | 9045 | CCUCCCUGGACAGCGACGGCG |
| 6442 | AGCUGACUGACGUUGAUAUCC | 9046 | CUCCCUGGACAGCGACGGCGG |
| 6443 | GCUGACUGACGUUGAUAUCCA | 9047 | UCCCUGGACAGCGACGGCGGC |
| 6444 | CUGACUGACGUUGAUAUCCAA | 9048 | CCCUGGACAGCGACGGCGGCC |
| 6445 | UGACUGACGUUGAUAUCCAAG | 9049 | CCUGGACAGCGACGGCGGCCG |
| 6446 | GACUGACGUUGAUAUCCAAGA | 9050 | CUGGACAGCGACGGCGGCCGG |
| 6447 | ACUGACGUUGAUAUCCAAGAU | 9051 | UGGACAGCGACGGCGGCCGGA |
| 6448 | CUGACGUUGAUAUCCAAGAUG | 9052 | GGACAGCGACGGCGGCCGGAA |
| 6449 | UGACGUUGAUAUCCAAGAUGA | 9053 | GACAGCGACGGCGGCCGGAAA |
| 6450 | GACGUUGAUAUCCAAGAUGAU | 9054 | ACAGCGACGGCGGCCGGAAAC |
| 6451 | ACGUUGAUAUCCAAGAUGAUC | 9055 | AGGUUGGUGUUCUAACACCCA |
| 6452 | CGUUGAUAUCCAAGAUGAUCU | 9056 | GGUUGGUGUUCUAACACCCAG |
| 6453 | GUUGAUAUCCAAGAUGAUCUC | 9057 | GUUGGUGUUCUAACACCCAGU |
| 6454 | UUGAUAUCCAAGAUGAUCUCC | 9058 | UUGGUGUUCUAACACCCAGUU |
| 6455 | UGAUAUCCAAGAUGAUCUCCA | 9059 | UGGUGUUCUAACACCCAGUUC |
| 6456 | GAUAUCCAAGAUGAUCUCCAC | 9060 | GGUGUUCUAACACCCAGUUCA |
| 6457 | AUAUCCAAGAUGAUCUCCACC | 9061 | GUGUUCUAACACCCAGUUCAG |
| 6458 | UAUCCAAGAUGAUCUCCACCA | 9062 | UGUUCUAACACCCAGUUCAGC |
| 6459 | AUCCAAGAUGAUCUCCACCAG | 9063 | GUUCUAACACCCAGUUCAGCA |
| 6460 | UCCAAGAUGAUCUCCACCAGG | 9064 | UUCUAACACCCAGUUCAGCAU |
| 6461 | CCAAGAUGAUCUCCACCAGGU | 9065 | UCUAACACCCAGUUCAGCAUG |
| 6462 | CAAGAUGAUCUCCACCAGGUU | 9066 | CUAACACCCAGUUCAGCAUGU |
| 6463 | AAGAUGAUCUCCACCAGGUUG | 9067 | UAACACCCAGUUCAGCAUGUG |
| 6464 | AGAUGAUCUCCACCAGGUUGU | 9068 | AACACCCAGUUCAGCAUGUGA |
| 6465 | GAUGAUCUCCACCAGGUUGUU | 9069 | ACACCCAGUUCAGCAUGUGAG |
| 6466 | AUGAUCUCCACCAGGUUGUUU | 9070 | CACCCAGUUCAGCAUGUGAGU |
| 6467 | UGAUCUCCACCAGGUUGUUUU | 9071 | ACCCAGUUCAGCAUGUGAGUG |
| 6468 | GAUCUCCACCAGGUUGUUUUU | 9072 | CCCAGUUCAGCAUGUGAGUGA |
| 6469 | AUCUCCACCAGGUUGUUUUUC | 9073 | CCAGUUCAGCAUGUGAGUGAA |
| 6470 | UCUCCACCAGGUUGUUUUUCC | 9074 | CAGUUCAGCAUGUGAGUGAAU |
| 6471 | CUCCACCAGGUUGUUUUUCCU | 9075 | AGUUCAGCAUGUGAGUGAAUA |
| 6472 | UCCACCAGGUUGUUUUUCCUG | 9076 | GUUCAGCAUGUGAGUGAAUAU |
| 6473 | CCACCAGGUUGUUUUUCCUGG | 9077 | UUCAGCAUGUGAGUGAAUAUG |
| 6474 | CACCAGGUUGUUUUUCCUGGG | 9078 | UCAGCAUGUGAGUGAAUAUGG |
| 6475 | ACCAGGUUGUUUUUCCUGGGA | 9079 | CAGCAUGUGAGUGAAUAUGGA |
| 6476 | CCAGGUUGUUUUUCCUGGGAU | 9080 | AGCAUGUGAGUGAAUAUGGAG |
| 6477 | CAGGUUGUUUUUCCUGGGAUC | 9081 | GCAUGUGAGUGAAUAUGGAGU |
| 6478 | AGGUUGUUUUUCCUGGGAUCA | 9082 | CAUGUGAGUGAAUAUGGAGUC |
| 6479 | GGUUGUUUUUCCUGGGAUCAG | 9083 | AUGUGAGUGAAUAUGGAGUCA |
| 6480 | GUUGUUUUUCCUGGGAUCAGG | 9084 | UGUGAGUGAAUAUGGAGUCAG |
| 6481 | UUGUUUUUCCUGGGAUCAGGU | 9085 | GUGAGUGAAUAUGGAGUCAGA |
| 6482 | UGUUUUUCCUGGGAUCAGGUU | 9086 | UGAGUGAAUAUGGAGUCAGAU |
| 6483 | GUUUUUCCUGGGAUCAGGUUU | 9087 | GAGUGAAUAUGGAGUCAGAUA |
| 6484 | UUUUUCCUGGGAUCAGGUUUC | 9088 | AGUGAAUAUGGAGUCAGAUAU |
| 6485 | UUUUCCUGGGAUCAGGUUUCA | 9089 | GUGAAUAUGGAGUCAGAUAUC |
| 6486 | UUUCCUGGGAUCAGGUUUCAC | 9090 | UGAAUAUGGAGUCAGAUAUCA |
| 6487 | UUCCUGGGAUCAGGUUUCACC | 9091 | GAAUAUGGAGUCAGAUAUCAU |
| 6488 | UCCUGGGAUCAGGUUUCACCU | 9092 | AAUAUGGAGUCAGAUAUCAUG |
| 6489 | CCUGGGAUCAGGUUUCACCUC | 9093 | AUAUGGAGUCAGAUAUCAUGA |
| 6490 | CUGGGAUCAGGUUUCACCUCC | 9094 | UAUGGAGUCAGAUAUCAUGAG |
| 6491 | UGGGAUCAGGUUUCACCUCCA | 9095 | AUGGAGUCAGAUAUCAUGAGG |
| 6492 | GGGAUCAGGUUUCACCUCCAC | 9096 | UGGAGUCAGAUAUCAUGAGGC |
| 6493 | GGAUCAGGUUUCACCUCCACA | 9097 | GGAGUCAGAUAUCAUGAGGCA |
| 6494 | GAUCAGGUUUCACCUCCACAG | 9098 | GAGUCAGAUAUCAUGAGGCAC |
| 6495 | AUCAGGUUUCACCUCCACAGU | 9099 | AGUCAGAUAUCAUGAGGCACC |
| 6496 | UCAGGUUUCACCUCCACAGUG | 9100 | GUCAGAUAUCAUGAGGCACCU |
| 6497 | CAGGUUUCACCUCCACAGUGG | 9101 | UCAGAUAUCAUGAGGCACCUU |
| 6498 | AGGUUUCACCUCCACAGUGGU | 9102 | CAGAUAUCAUGAGGCACCUUG |
| 6499 | GGUUUCACCUCCACAGUGGUC | 9103 | AGAUAUCAUGAGGCACCUUGC |
| 6500 | GUUUCACCUCCACAGUGGUCC | 9104 | GAUAUCAUGAGGCACCUUGCU |
| 6501 | UUUCACCUCCACAGUGGUCCG | 9105 | AUAUCAUGAGGCACCUUGCUA |
| 6502 | UUCACCUCCACAGUGGUCCGG | 9106 | UAUCAUGAGGCACCUUGCUAA |
| 6503 | UCACCUCCACAGUGGUCCGGU | 9107 | AUCAUGAGGCACCUUGCUAAG |
| 6504 | CACCUCCACAGUGGUCCGGUC | 9108 | UCAUGAGGCACCUUGCUAAGG |
| 6505 | ACCUCCACAGUGGUCCGGUCU | 9109 | CAUGAGGCACCUUGCUAAGGG |
| 6506 | CCUCCACAGUGGUCCGGUCUG | 9110 | AUGAGGCACCUUGCUAAGGGU |
| 6507 | CUCCACAGUGGUCCGGUCUGU | 9111 | UGAGGCACCUUGCUAAGGGUU |
| 6508 | UCCACAGUGGUCCGGUCUGUG | 9112 | GAGGCACCUUGCUAAGGGUUU |
| 6509 | CCACAGUGGUCCGGUCUGUGU | 9113 | AGGCACCUUGCUAAGGGUUUC |
| 6510 | CACAGUGGUCCGGUCUGUGUC | 9114 | GGCACCUUGCUAAGGGUUUCC |
| 6511 | ACAGUGGUCCGGUCUGUGUCA | 9115 | GCACCUUGCUAAGGGUUUCCC |
| 6512 | CAGUGGUCCGGUCUGUGUCAC | 9116 | CACCUUGCUAAGGGUUUCCCC |
| 6513 | AGUGGUCCGGUCUGUGUCACU | 9117 | ACCUUGCUAAGGGUUUCCCCC |
| 6514 | GUGGUCCGGUCUGUGUCACUC | 9118 | CCUUGCUAAGGGUUUCCCCCU |
| 6515 | UGGUCCGGUCUGUGUCACUCU | 9119 | CUUGCUAAGGGUUUCCCCCUU |
| 6516 | GGUCCGGUCUGUGUCACUCUC | 9120 | UUGCUAAGGGUUUCCCCCUUC |
| 6517 | GUCCGGUCUGUGUCACUCUCA | 9121 | UGCUAAGGGUUUCCCCCUUCA |
| 6518 | UCCGGUCUGUGUCACUCUCAC | 9122 | GCUAAGGGUUUCCCCCUUCAA |
| 6519 | CCGGUCUGUGUCACUCUCACC | 9123 | CUAAGGGUUUCCCCCUUCAAG |
| 6520 | CGGUCUGUGUCACUCUCACCC | 9124 | UAAGGGUUUCCCCCUUCAAGG |
| 6521 | GGUCUGUGUCACUCUCACCCU | 9125 | AAGGGUUUCCCCCUUCAAGGA |
| 6522 | GUCUGUGUCACUCUCACCCUU | 9126 | AGGGUUUCCCCCUUCAAGGAA |
| 6523 | UCUGUGUCACUCUCACCCUUU | 9127 | GGGUUUCCCCCUUCAAGGAAA |
| 6524 | CUGUGUCACUCUCACCCUUUG | 9128 | GGUUUCCCCCUUCAAGGAAAC |
| 6525 | UGUGUCACUCUCACCCUUUGC | 9129 | GUUUCCCCCUUCAAGGAAACA |
| 6526 | GUGUCACUCUCACCCUUUGCA | 9130 | UUUCCCCCUUCAAGGAAACAA |
| 6527 | UGUCACUCUCACCCUUUGCAU | 9131 | UUCCCCCUUCAAGGAAACAAC |
| 6528 | GUCACUCUCACCCUUUGCAUC | 9132 | UCCCCCUUCAAGGAAACAACC |
| 6529 | UCACUCUCACCCUUUGCAUCG | 9133 | CCCCCUUCAAGGAAACAACCC |
| 6530 | CACUCUCACCCUUUGCAUCGG | 9134 | CCCCUUCAAGGAAACAACCCU |
| 6531 | ACUCUCACCCUUUGCAUCGGU | 9135 | CCCUUCAAGGAAACAACCCUC |
| 6532 | CUCUCACCCUUUGCAUCGGUC | 9136 | CCUUCAAGGAAACAACCCUCU |
| 6533 | UCUCACCCUUUGCAUCGGUCA | 9137 | CUUCAAGGAAACAACCCUCUC |
| 6534 | CUCACCCUUUGCAUCGGUCAC | 9138 | UUCAAGGAAACAACCCUCUCU |
| 6535 | UCACCCUUUGCAUCGGUCACU | 9139 | UCAAGGAAACAACCCUCUCUG |
| 6536 | CACCCUUUGCAUCGGUCACUU | 9140 | CAAGGAAACAACCCUCUCUGA |
| 6537 | ACCCUUUGCAUCGGUCACUUU | 9141 | AAGGAAACAACCCUCUCUGAC |
| 6538 | CCCUUUGCAUCGGUCACUUUC | 9142 | AGGAAACAACCCUCUCUGACA |
| 6539 | CCUUUGCAUCGGUCACUUUCA | 9143 | GGAAACAACCCUCUCUGACAC |
| 6540 | CUUUGCAUCGGUCACUUUCAG | 9144 | GAAACAACCCUCUCUGACACA |
| 6541 | UUUGCAUCGGUCACUUUCAGG | 9145 | AAACAACCCUCUCUGACACAG |
| 6542 | UUGCAUCGGUCACUUUCAGGU | 9146 | AACAACCCUCUCUGACACAGC |
| 6543 | UGCAUCGGUCACUUUCAGGUG | 9147 | ACAACCCUCUCUGACACAGCA |
| 6544 | GCAUCGGUCACUUUCAGGUGA | 9148 | AGACAGGCAGAACCAGUACAA |
| 6545 | CAUCGGUCACUUUCAGGUGAA | 9149 | GACAGGCAGAACCAGUACAAA |
| 6546 | AUCGGUCACUUUCAGGUGAAA | 9150 | ACAGGCAGAACCAGUACAAAG |
| 6547 | UCGGUCACUUUCAGGUGAAAA | 9151 | CAGGCAGAACCAGUACAAAGC |
| 6548 | CGGUCACUUUCAGGUGAAAAG | 9152 | AGGCAGAACCAGUACAAAGCG |
| 6549 | GGUCACUUUCAGGUGAAAAGU | 9153 | GGCAGAACCAGUACAAAGCGA |
| 6550 | GUCACUUUCAGGUGAAAAGUG | 9154 | GCAGAACCAGUACAAAGCGAA |
| 6551 | UCACUUUCAGGUGAAAAGUGU | 9155 | CAGAACCAGUACAAAGCGAAG |
| 6552 | CACUUUCAGGUGAAAAGUGUA | 9156 | AGAACCAGUACAAAGCGAAGG |
| 6553 | ACUUUCAGGUGAAAAGUGUAG | 9157 | GAACCAGUACAAAGCGAAGGA |
| 6554 | CUUUCAGGUGAAAAGUGUAGG | 9158 | AACCAGUACAAAGCGAAGGAA |
| 6555 | UUUCAGGUGAAAAGUGUAGGU | 9159 | ACCAGUACAAAGCGAAGGAAU |
| 6556 | UUCAGGUGAAAAGUGUAGGUU | 9160 | CCAGUACAAAGCGAAGGAAUC |
| 6557 | UCAGGUGAAAAGUGUAGGUUC | 9161 | CAGUACAAAGCGAAGGAAUCU |
| 6558 | CAGGUGAAAAGUGUAGGUUCC | 9162 | AGUACAAAGCGAAGGAAUCUG |
| 6559 | AGGUGAAAAGUGUAGGUUCCC | 9163 | GUACAAAGCGAAGGAAUCUGG |
| 6560 | GGUGAAAAGUGUAGGUUCCCU | 9164 | UACAAAGCGAAGGAAUCUGGG |
| 6561 | GUGAAAAGUGUAGGUUCCCUC | 9165 | ACAAAGCGAAGGAAUCUGGGC |
| 6562 | UGAAAAGUGUAGGUUCCCUCA | 9166 | CAAAGCGAAGGAAUCUGGGCC |
| 6563 | GAAAAGUGUAGGUUCCCUCAA | 9167 | AAAGCGAAGGAAUCUGGGCCC |
| 6564 | AAAAGUGUAGGUUCCCUCAAC | 9168 | AAGCGAAGGAAUCUGGGCCCC |
| 6565 | AAAGUGUAGGUUCCCUCAACC | 9169 | AGCGAAGGAAUCUGGGCCCCC |
| 6566 | AAGUGUAGGUUCCCUCAACCA | 9170 | GCGAAGGAAUCUGGGCCCCCA |
| 6567 | AGUGUAGGUUCCCUCAACCAG | 9171 | CGAAGGAAUCUGGGCCCCCAG |
| 6568 | GUGUAGGUUCCCUCAACCAGG | 9172 | GAAGGAAUCUGGGCCCCCAGC |
| 6569 | UGUAGGUUCCCUCAACCAGGU | 9173 | AAGGAAUCUGGGCCCCCAGCC |
| 6570 | GUAGGUUCCCUCAACCAGGUU | 9174 | AGGAAUCUGGGCCCCCAGCCU |
| 6571 | UAGGUUCCCUCAACCAGGUUU | 9175 | GGAAUCUGGGCCCCCAGCCUC |
| 6572 | AGGUUCCCUCAACCAGGUUUG | 9176 | GAAUCUGGGCCCCCAGCCUCU |
| 6573 | GGUUCCCUCAACCAGGUUUGA | 9177 | AAUCUGGGCCCCCAGCCUCUC |
| 6574 | GUUCCCUCAACCAGGUUUGAA | 9178 | AUCUGGGCCCCCAGCCUCUCG |
| 6575 | UUCCCUCAACCAGGUUUGAAA | 9179 | UCUGGGCCCCCAGCCUCUCGC |
| 6576 | UCCCUCAACCAGGUUUGAAAG | 9180 | CUGGGCCCCCAGCCUCUCGCC |
| 6577 | CCCUCAACCAGGUUUGAAAGA | 9181 | UGGGCCCCCAGCCUCUCGCCG |
| 6578 | CCUCAACCAGGUUUGAAAGAA | 9182 | GGGCCCCCAGCCUCUCGCCGC |
| 6579 | CUCAACCAGGUUUGAAAGAAA | 9183 | GGCCCCCAGCCUCUCGCCGCC |
| 6580 | UCAACCAGGUUUGAAAGAAAA | 9184 | GCCCCCAGCCUCUCGCCGCCC |
| 6581 | CAACCAGGUUUGAAAGAAAAA | 9185 | CCCCCAGCCUCUCGCCGCCCG |
| 6582 | AACCAGGUUUGAAAGAAAAAG | 9186 | CCCCAGCCUCUCGCCGCCCGC |
| 6583 | ACCAGGUUUGAAAGAAAAAGG | 9187 | CCCAGCCUCUCGCCGCCCGCU |
| 6584 | CCAGGUUUGAAAGAAAAAGGA | 9188 | CCAGCCUCUCGCCGCCCGCUC |
| 6585 | CAGGUUUGAAAGAAAAAGGAU | 9189 | CAGCCUCUCGCCGCCCGCUCU |
| 6586 | AGGUUUGAAAGAAAAAGGAUA | 9190 | AGCCUCUCGCCGCCCGCUCUC |
| 6587 | GGUUUGAAAGAAAAAGGAUAG | 9191 | GCCUCUCGCCGCCCGCUCUCC |
| 6588 | GUUUGAAAGAAAAAGGAUAGG | 9192 | CCUCUCGCCGCCCGCUCUCCA |
| 6589 | UUUGAAAGAAAAAGGAUAGGG | 9193 | CUCUCGCCGCCCGCUCUCCAG |
| 6590 | UUGAAAGAAAAAGGAUAGGGU | 9194 | UCUCGCCGCCCGCUCUCCAGA |
| 6591 | UGAAAGAAAAAGGAUAGGGUG | 9195 | CUCGCCGCCCGCUCUCCAGAG |
| 6592 | GAAAGAAAAAGGAUAGGGUGA | 9196 | UCGCCGCCCGCUCUCCAGAGG |
| 6593 | AAAGAAAAAGGAUAGGGUGAU | 9197 | CGCCGCCCGCUCUCCAGAGGC |
| 6594 | AAGAAAAAGGAUAGGGUGAUG | 9198 | GCCGCCCGCUCUCCAGAGGCA |
| 6595 | AGAAAAAGGAUAGGGUGAUGG | 9199 | CCGCCCGCUCUCCAGAGGCAG |
| 6596 | GAAAAAGGAUAGGGUGAUGGU | 9200 | CGCCCGCUCUCCAGAGGCAGU |
| 6597 | AAAAAGGAUAGGGUGAUGGUC | 9201 | GCCCGCUCUCCAGAGGCAGUC |
| 6598 | AAAAGGAUAGGGUGAUGGUCA | 9202 | CCCGCUCUCCAGAGGCAGUCU |
| 6599 | AAAGGAUAGGGUGAUGGUCAG | 9203 | CCGCUCUCCAGAGGCAGUCUG |
| 6600 | AAGGAUAGGGUGAUGGUCAGA | 9204 | CGCUCUCCAGAGGCAGUCUGC |
| 6601 | AGGAUAGGGUGAUGGUCAGAG | 9205 | GCUCUCCAGAGGCAGUCUGCA |
| 6602 | GGAUAGGGUGAUGGUCAGAGU | 9206 | CUCUCCAGAGGCAGUCUGCAC |
| 6603 | GAUAGGGUGAUGGUCAGAGUG | 9207 | UCUCCAGAGGCAGUCUGCACC |
| 6604 | AUAGGGUGAUGGUCAGAGUGA | 9208 | CUCCAGAGGCAGUCUGCACCU |
| 6605 | UAGGGUGAUGGUCAGAGUGAU | 9209 | UCCAGAGGCAGUCUGCACCUU |
| 6606 | AGGGUGAUGGUCAGAGUGAUU | 9210 | CCAGAGGCAGUCUGCACCUUG |
| 6607 | GGGUGAUGGUCAGAGUGAUUU | 9211 | CAGAGGCAGUCUGCACCUUGC |
| 6608 | GGUGAUGGUCAGAGUGAUUUA | 9212 | AGAGGCAGUCUGCACCUUGCC |
| 6609 | GUGAUGGUCAGAGUGAUUUAA | 9213 | GAGGCAGUCUGCACCUUGCCU |
| 6610 | UGAUGGUCAGAGUGAUUUAAC | 9214 | AGGCAGUCUGCACCUUGCCUC |
| 6611 | GAUGGUCAGAGUGAUUUAACA | 9215 | GGCAGUCUGCACCUUGCCUCC |
| 6612 | AUGGUCAGAGUGAUUUAACAC | 9216 | GCAGUCUGCACCUUGCCUCCU |
| 6613 | UGGUCAGAGUGAUUUAACACC | 9217 | CAGUCUGCACCUUGCCUCCUU |
| 6614 | GGUCAGAGUGAUUUAACACCU | 9218 | AGUCUGCACCUUGCCUCCUUC |
| 6615 | GUCAGAGUGAUUUAACACCUC | 9219 | GUCUGCACCUUGCCUCCUUCG |
| 6616 | UCAGAGUGAUUUAACACCUCC | 9220 | UCUGCACCUUGCCUCCUUCGC |
| 6617 | CAGAGUGAUUUAACACCUCCC | 9221 | CUGCACCUUGCCUCCUUCGCU |
| 6618 | AGAGUGAUUUAACACCUCCCC | 9222 | UGCACCUUGCCUCCUUCGCUC |
| 6619 | GAGUGAUUUAACACCUCCCCU | 9223 | GCACCUUGCCUCCUUCGCUCG |
| 6620 | AGUGAUUUAACACCUCCCCUG | 9224 | CACCUUGCCUCCUUCGCUCGA |
| 6621 | GUGAUUUAACACCUCCCCUGC | 9225 | ACCUUGCCUCCUUCGCUCGAG |
| 6622 | UGAUUUAACACCUCCCCUGCU | 9226 | CCUUGCCUCCUUCGCUCGAGC |
| 6623 | GAUUUAACACCUCCCCUGCUG | 9227 | CUUGCCUCCUUCGCUCGAGCC |
| 6624 | AUUUAACACCUCCCCUGCUGC | 9228 | UUGCCUCCUUCGCUCGAGCCC |
| 6625 | UUUAACACCUCCCCUGCUGCU | 9229 | UGCCUCCUUCGCUCGAGCCCC |
| 6626 | UUAACACCUCCCCUGCUGCUG | 9230 | GCCUCCUUCGCUCGAGCCCCA |
| 6627 | UAACACCUCCCCUGCUGCUGG | 9231 | CCUCCUUCGCUCGAGCCCCAG |
| 6628 | AACACCUCCCCUGCUGCUGGG | 9232 | CUCCUUCGCUCGAGCCCCAGC |
| 6629 | ACACCUCCCCUGCUGCUGGGC | 9233 | UCCUUCGCUCGAGCCCCAGCC |
| 6630 | CACCUCCCCUGCUGCUGGGCU | 9234 | CCUUCGCUCGAGCCCCAGCCC |
| 6631 | ACCUCCCCUGCUGCUGGGCUC | 9235 | CUUCGCUCGAGCCCCAGCCCC |
| 6632 | CCUCCCCUGCUGCUGGGCUCC | 9236 | UUCGCUCGAGCCCCAGCCCCC |
| 6633 | CUCCCCUGCUGCUGGGCUCCC | 9237 | UCGCUCGAGCCCCAGCCCCCA |
| 6634 | UCCCCUGCUGCUGGGCUCCCC | 9238 | CGCUCGAGCCCCAGCCCCCAG |
| 6635 | CCCCUGCUGCUGGGCUCCCCU | 9239 | GCUCGAGCCCCAGCCCCCAGA |
| 6636 | CCCUGCUGCUGGGCUCCCCUC | 9240 | CUCGAGCCCCAGCCCCCAGAC |
| 6637 | CCUGCUGCUGGGCUCCCCUCA | 9241 | UCGAGCCCCAGCCCCCAGACU |
| 6638 | CUGCUGCUGGGCUCCCCUCAU | 9242 | CGAGCCCCAGCCCCCAGACUC |
| 6639 | UGCUGCUGGGCUCCCCUCAUC | 9243 | GAGCCCCAGCCCCCAGACUCG |
| 6640 | GCUGCUGGGCUCCCCUCAUCU | 9244 | AGCCCCAGCCCCCAGACUCGG |
| 6641 | CUGCUGGGCUCCCCUCAUCUC | 9245 | GCCCCAGCCCCCAGACUCGGG |
| 6642 | UGCUGGGCUCCCCUCAUCUCG | 9246 | CCCCAGCCCCCAGACUCGGGC |
| 6643 | GCUGGGCUCCCCUCAUCUCGA | 9247 | CCCAGCCCCCAGACUCGGGCA |
| 6644 | CUGGGCUCCCCUCAUCUCGAG | 9248 | CCAGCCCCCAGACUCGGGCAA |
| 6645 | UGGGCUCCCCUCAUCUCGAGU | 9249 | CAGCCCCCAGACUCGGGCAAU |
| 6646 | GGGCUCCCCUCAUCUCGAGUC | 9250 | AGCCCCCAGACUCGGGCAAUA |
| 6647 | GGCUCCCCUCAUCUCGAGUCC | 9251 | GCCCCCAGACUCGGGCAAUAC |
| 6648 | GCUCCCCUCAUCUCGAGUCCA | 9252 | CCCCCAGACUCGGGCAAUACC |
| 6649 | CUCCCCUCAUCUCGAGUCCAG | 9253 | CCCCAGACUCGGGCAAUACCC |
| 6650 | UCCCCUCAUCUCGAGUCCAGA | 9254 | AGACAGGCAGAACCAGUACAU |
| 6651 | CCCCUCAUCUCGAGUCCAGAG | 9255 | GACAGGCAGAACCAGUACAUU |
| 6652 | CCCUCAUCUCGAGUCCAGAGG | 9256 | ACAGGCAGAACCAGUACAUUU |
| 6653 | CCUCAUCUCGAGUCCAGAGGU | 9257 | CAGGCAGAACCAGUACAUUUU |
| 6654 | CUCAUCUCGAGUCCAGAGGUA | 9258 | AGGCAGAACCAGUACAUUUUG |
| 6655 | UCAUCUCGAGUCCAGAGGUAG | 9259 | GGCAGAACCAGUACAUUUUGA |
| 6656 | CAUCUCGAGUCCAGAGGUAGC | 9260 | GCAGAACCAGUACAUUUUGAG |
| 6657 | AUCUCGAGUCCAGAGGUAGCU | 9261 | CAGAACCAGUACAUUUUGAGG |
| 6658 | UCUCGAGUCCAGAGGUAGCUG | 9262 | AGAACCAGUACAUUUUGAGGA |
| 6659 | CUCGAGUCCAGAGGUAGCUGA | 9263 | GAACCAGUACAUUUUGAGGAG |
| 6660 | UCGAGUCCAGAGGUAGCUGAC | 9264 | AACCAGUACAUUUUGAGGAGA |
| 6661 | CGAGUCCAGAGGUAGCUGACU | 9265 | ACCAGUACAUUUUGAGGAGAA |
| 6662 | GAGUCCAGAGGUAGCUGACUA | 9266 | CCAGUACAUUUUGAGGAGAAG |
| 6663 | AGUCCAGAGGUAGCUGACUAU | 9267 | CAGUACAUUUUGAGGAGAAGA |
| 6664 | GUCCAGAGGUAGCUGACUAUU | 9268 | AGUACAUUUUGAGGAGAAGAG |
| 6665 | UCCAGAGGUAGCUGACUAUUC | 9269 | GUACAUUUUGAGGAGAAGAGG |
| 6666 | CCAGAGGUAGCUGACUAUUCC | 9270 | UACAUUUUGAGGAGAAGAGGU |
| 6667 | CAGAGGUAGCUGACUAUUCCC | 9271 | ACAUUUUGAGGAGAAGAGGUU |
| 6668 | AGAGGUAGCUGACUAUUCCCU | 9272 | CAUUUUGAGGAGAAGAGGUUG |
| 6669 | GAGGUAGCUGACUAUUCCCUU | 9273 | AUUUUGAGGAGAAGAGGUUGC |
| 6670 | AGGUAGCUGACUAUUCCCUUG | 9274 | UUUUGAGGAGAAGAGGUUGCA |
| 6671 | GGUAGCUGACUAUUCCCUUGU | 9275 | UUUGAGGAGAAGAGGUUGCAC |
| 6672 | GUAGCUGACUAUUCCCUUGUC | 9276 | UUGAGGAGAAGAGGUUGCACC |
| 6673 | UAGCUGACUAUUCCCUUGUCA | 9277 | UGAGGAGAAGAGGUUGCACCC |
| 6674 | AGCUGACUAUUCCCUUGUCAU | 9278 | GAGGAGAAGAGGUUGCACCCU |
| 6675 | GCUGACUAUUCCCUUGUCAUC | 9279 | AGGAGAAGAGGUUGCACCCUC |
| 6676 | CUGACUAUUCCCUUGUCAUCU | 9280 | GGAGAAGAGGUUGCACCCUCA |
| 6677 | UGACUAUUCCCUUGUCAUCUG | 9281 | GAGAAGAGGUUGCACCCUCAG |
| 6678 | GACUAUUCCCUUGUCAUCUGA | 9282 | AGAAGAGGUUGCACCCUCAGA |
| 6679 | ACUAUUCCCUUGUCAUCUGAG | 9283 | GAAGAGGUUGCACCCUCAGAG |
| 6680 | CUAUUCCCUUGUCAUCUGAGG | 9284 | AAGAGGUUGCACCCUCAGAGG |
| 6681 | UAUUCCCUUGUCAUCUGAGGA | 9285 | AGAGGUUGCACCCUCAGAGGU |
| 6682 | AUUCCCUUGUCAUCUGAGGAC | 9286 | GAGGUUGCACCCUCAGAGGUA |
| 6683 | UUCCCUUGUCAUCUGAGGACU | 9287 | AGGUUGCACCCUCAGAGGUAA |
| 6684 | UCCCUUGUCAUCUGAGGACUU | 9288 | GGUUGCACCCUCAGAGGUAAA |
| 6685 | CCCUUGUCAUCUGAGGACUUA | 9289 | GUUGCACCCUCAGAGGUAAAG |
| 6686 | CCUUGUCAUCUGAGGACUUAG | 9290 | UUGCACCCUCAGAGGUAAAGU |
| 6687 | CUUGUCAUCUGAGGACUUAGA | 9291 | UGCACCCUCAGAGGUAAAGUA |
| 6688 | UUGUCAUCUGAGGACUUAGAG | 9292 | GCACCCUCAGAGGUAAAGUAA |
| 6689 | UGUCAUCUGAGGACUUAGAGC | 9293 | CACCCUCAGAGGUAAAGUAAC |
| 6690 | GUCAUCUGAGGACUUAGAGCC | 9294 | ACCCUCAGAGGUAAAGUAACC |
| 6691 | UCAUCUGAGGACUUAGAGCCA | 9295 | CCCUCAGAGGUAAAGUAACCU |
| 6692 | CAUCUGAGGACUUAGAGCCAU | 9296 | CCUCAGAGGUAAAGUAACCUG |
| 6693 | AUCUGAGGACUUAGAGCCAUC | 9297 | CUCAGAGGUAAAGUAACCUGA |
| 6694 | UCUGAGGACUUAGAGCCAUCC | 9298 | UCAGAGGUAAAGUAACCUGAG |
| 6695 | CUGAGGACUUAGAGCCAUCCA | 9299 | CAGAGGUAAAGUAACCUGAGG |
| 6696 | UGAGGACUUAGAGCCAUCCAG | 9300 | AGAGGUAAAGUAACCUGAGGG |
| 6697 | GAGGACUUAGAGCCAUCCAGC | 9301 | GAGGUAAAGUAACCUGAGGGU |
| 6698 | AGGACUUAGAGCCAUCCAGCU | 9302 | AGGUAAAGUAACCUGAGGGUU |
| 6699 | GGACUUAGAGCCAUCCAGCUC | 9303 | GGUAAAGUAACCUGAGGGUUA |
| 6700 | GACUUAGAGCCAUCCAGCUCU | 9304 | GUAAAGUAACCUGAGGGUUAU |
| 6701 | ACUUAGAGCCAUCCAGCUCUG | 9305 | UAAAGUAACCUGAGGGUUAUG |
| 6702 | CUUAGAGCCAUCCAGCUCUGC | 9306 | AAAGUAACCUGAGGGUUAUGU |
| 6703 | UUAGAGCCAUCCAGCUCUGCU | 9307 | AAGUAACCUGAGGGUUAUGUC |
| 6704 | UAGAGCCAUCCAGCUCUGCUG | 9308 | AGUAACCUGAGGGUUAUGUCU |
| 6705 | AGAGCCAUCCAGCUCUGCUGU | 9309 | GUAACCUGAGGGUUAUGUCUG |
| 6706 | GAGCCAUCCAGCUCUGCUGUG | 9310 | UAACCUGAGGGUUAUGUCUGG |
| 6707 | AGCCAUCCAGCUCUGCUGUGC | 9311 | AACCUGAGGGUUAUGUCUGGC |
| 6708 | GCCAUCCAGCUCUGCUGUGCU | 9312 | ACCUGAGGGUUAUGUCUGGCC |
| 6709 | CCAUCCAGCUCUGCUGUGCUC | 9313 | CCUGAGGGUUAUGUCUGGCCC |
| 6710 | CAUCCAGCUCUGCUGUGCUCG | 9314 | CUGAGGGUUAUGUCUGGCCCA |
| 6711 | AUCCAGCUCUGCUGUGCUCGU | 9315 | UGAGGGUUAUGUCUGGCCCAG |
| 6712 | UCCAGCUCUGCUGUGCUCGUG | 9316 | GAGGGUUAUGUCUGGCCCAGU |
| 6713 | CCAGCUCUGCUGUGCUCGUGG | 9317 | AGGGUUAUGUCUGGCCCAGUA |
| 6714 | CAGCUCUGCUGUGCUCGUGGG | 9318 | GGGUUAUGUCUGGCCCAGUAU |
| 6715 | AGCUCUGCUGUGCUCGUGGGU | 9319 | GGUUAUGUCUGGCCCAGUAUU |
| 6716 | GCUCUGCUGUGCUCGUGGGUA | 9320 | GUUAUGUCUGGCCCAGUAUUU |
| 6717 | CUCUGCUGUGCUCGUGGGUAG | 9321 | UUAUGUCUGGCCCAGUAUUUU |
| 6718 | UCUGCUGUGCUCGUGGGUAGG | 9322 | UAUGUCUGGCCCAGUAUUUUU |
| 6719 | CUGCUGUGCUCGUGGGUAGGG | 9323 | AUGUCUGGCCCAGUAUUUUUU |
| 6720 | UGCUGUGCUCGUGGGUAGGGU | 9324 | UGUCUGGCCCAGUAUUUUUUA |
| 6721 | GCUGUGCUCGUGGGUAGGGUA | 9325 | GUCUGGCCCAGUAUUUUUUAA |
| 6722 | CUGUGCUCGUGGGUAGGGUAA | 9326 | UCUGGCCCAGUAUUUUUUAAA |
| 6723 | UGUGCUCGUGGGUAGGGUAAU | 9327 | CUGGCCCAGUAUUUUUUAAAU |
| 6724 | GUGCUCGUGGGUAGGGUAAUC | 9328 | UGGCCCAGUAUUUUUUAAAUU |
| 6725 | UGCUCGUGGGUAGGGUAAUCA | 9329 | GGCCCAGUAUUUUUUAAAUUU |
| 6726 | GCUCGUGGGUAGGGUAAUCAC | 9330 | GCCCAGUAUUUUUUAAAUUUC |
| 6727 | CUCGUGGGUAGGGUAAUCACC | 9331 | CCCAGUAUUUUUUAAAUUUCU |
| 6728 | UCGUGGGUAGGGUAAUCACCA | 9332 | CCAGUAUUUUUUAAAUUUCUG |
| 6729 | CGUGGGUAGGGUAAUCACCAC | 9333 | CAGUAUUUUUUAAAUUUCUGA |
| 6730 | GUGGGUAGGGUAAUCACCACA | 9334 | AGUAUUUUUUAAAUUUCUGAA |
| 6731 | UGGGUAGGGUAAUCACCACAU | 9335 | GUAUUUUUUAAAUUUCUGAAU |
| 6732 | GGGUAGGGUAAUCACCACAUU | 9336 | UAUUUUUUAAAUUUCUGAAUG |
| 6733 | GGUAGGGUAAUCACCACAUUC | 9337 | AUUUUUUAAAUUUCUGAAUGC |
| 6734 | GUAGGGUAAUCACCACAUUCC | 9338 | UUUUUUAAAUUUCUGAAUGCA |
| 6735 | UAGGGUAAUCACCACAUUCCC | 9339 | UUUUUAAAUUUCUGAAUGCAA |
| 6736 | AGGGUAAUCACCACAUUCCCA | 9340 | UUUUAAAUUUCUGAAUGCAAA |
| 6737 | GGGUAAUCACCACAUUCCCAG | 9341 | UUUAAAUUUCUGAAUGCAAAU |
| 6738 | GGUAAUCACCACAUUCCCAGU | 9342 | CGUAGGUGUAGGUUUCUCCUG |
| 6739 | GUAAUCACCACAUUCCCAGUU | 9343 | GUAGGUGUAGGUUUCUCCUGG |
| 6740 | UAAUCACCACAUUCCCAGUUA | 9344 | UAGGUGUAGGUUUCUCCUGGG |
| 6741 | AAUCACCACAUUCCCAGUUAU | 9345 | AGGUGUAGGUUUCUCCUGGGU |
| 6742 | AUCACCACAUUCCCAGUUAUC | 9346 | GGUGUAGGUUUCUCCUGGGUA |
| 6743 | UCACCACAUUCCCAGUUAUCU | 9347 | GUGUAGGUUUCUCCUGGGUAU |
| 6744 | CACCACAUUCCCAGUUAUCUU | 9348 | UGUAGGUUUCUCCUGGGUAUG |
| 6745 | ACCACAUUCCCAGUUAUCUUG | 9349 | GUAGGUUUCUCCUGGGUAUGG |
| 6746 | CCACAUUCCCAGUUAUCUUGG | 9350 | UAGGUUUCUCCUGGGUAUGGU |
| 6747 | CACAUUCCCAGUUAUCUUGGC | 9351 | AGGUUUCUCCUGGGUAUGGUG |
| 6748 | ACAUUCCCAGUUAUCUUGGCU | 9352 | GGUUUCUCCUGGGUAUGGUGC |
| 6749 | CAUUCCCAGUUAUCUUGGCUA | 9353 | GUUUCUCCUGGGUAUGGUGCU |
| 6750 | AUUCCCAGUUAUCUUGGCUAU | 9354 | UUUCUCCUGGGUAUGGUGCUG |
| 6751 | UUCCCAGUUAUCUUGGCUAUA | 9355 | UUCUCCUGGGUAUGGUGCUGA |
| 6752 | UCCCAGUUAUCUUGGCUAUAG | 9356 | UCUCCUGGGUAUGGUGCUGAG |
| 6753 | CCCAGUUAUCUUGGCUAUAGG | 9357 | CUCCUGGGUAUGGUGCUGAGG |
| 6754 | CCAGUUAUCUUGGCUAUAGGU | 9358 | UCCUGGGUAUGGUGCUGAGGU |
| 6755 | CAGUUAUCUUGGCUAUAGGUG | 9359 | CCUGGGUAUGGUGCUGAGGUG |
| 6756 | AGUUAUCUUGGCUAUAGGUGG | 9360 | GACAGGCAGAACCAGUACACU |
| 6757 | GUUAUCUUGGCUAUAGGUGGU | 9361 | ACAGGCAGAACCAGUACACUC |
| 6758 | UUAUCUUGGCUAUAGGUGGUU | 9362 | CAGGCAGAACCAGUACACUCU |
| 6759 | UAUCUUGGCUAUAGGUGGUUU | 9363 | AGGCAGAACCAGUACACUCUC |
| 6760 | AUCUUGGCUAUAGGUGGUUUG | 9364 | GGCAGAACCAGUACACUCUCG |
| 6761 | UCUUGGCUAUAGGUGGUUUGU | 9365 | GCAGAACCAGUACACUCUCGC |
| 6762 | CUUGGCUAUAGGUGGUUUGUU | 9366 | CAGAACCAGUACACUCUCGCC |
| 6763 | UUGGCUAUAGGUGGUUUGUUU | 9367 | AGAACCAGUACACUCUCGCCU |
| 6764 | UGGCUAUAGGUGGUUUGUUUA | 9368 | GAACCAGUACACUCUCGCCUC |
| 6765 | GGCUAUAGGUGGUUUGUUUAU | 9369 | AACCAGUACACUCUCGCCUCA |
| 6766 | GCUAUAGGUGGUUUGUUUAUU | 9370 | ACCAGUACACUCUCGCCUCAG |
| 6767 | CUAUAGGUGGUUUGUUUAUUU | 9371 | CCAGUACACUCUCGCCUCAGC |
| 6768 | UAUAGGUGGUUUGUUUAUUUC | 9372 | CAGUACACUCUCGCCUCAGCC |
| 6769 | AUAGGUGGUUUGUUUAUUUCU | 9373 | AGUACACUCUCGCCUCAGCCU |
| 6770 | UAGGUGGUUUGUUUAUUUCUU | 9374 | GUACACUCUCGCCUCAGCCUC |
| 6771 | AGGUGGUUUGUUUAUUUCUUC | 9375 | UACACUCUCGCCUCAGCCUCC |
| 6772 | GGUGGUUUGUUUAUUUCUUCU | 9376 | ACACUCUCGCCUCAGCCUCCC |
| 6773 | GUGGUUUGUUUAUUUCUUCUU | 9377 | CACUCUCGCCUCAGCCUCCCU |
| 6774 | UGGUUUGUUUAUUUCUUCUUU | 9378 | ACUCUCGCCUCAGCCUCCCUG |
| 6775 | GGUUUGUUUAUUUCUUCUUUG | 9379 | ACAGGCAGAACCAGUACACUA |
| 6776 | GUUUGUUUAUUUCUUCUUUGA | 9380 | CAGGCAGAACCAGUACACUAU |
| 6777 | UUUGUUUAUUUCUUCUUUGAC | 9381 | AGGCAGAACCAGUACACUAUG |
| 6778 | UUGUUUAUUUCUUCUUUGACA | 9382 | GGCAGAACCAGUACACUAUGU |
| 6779 | UGUUUAUUUCUUCUUUGACAA | 9383 | GCAGAACCAGUACACUAUGUG |
| 6780 | GUUUAUUUCUUCUUUGACAAU | 9384 | CAGAACCAGUACACUAUGUGG |
| 6781 | UUUAUUUCUUCUUUGACAAUG | 9385 | AGAACCAGUACACUAUGUGGU |
| 6782 | UUAUUUCUUCUUUGACAAUGA | 9386 | GAACCAGUACACUAUGUGGUA |
| 6783 | UAUUUCUUCUUUGACAAUGAC | 9387 | AACCAGUACACUAUGUGGUAG |
| 6784 | AUUUCUUCUUUGACAAUGACA | 9388 | ACCAGUACACUAUGUGGUAGA |
| 6785 | UUUCUUCUUUGACAAUGACAU | 9389 | CCAGUACACUAUGUGGUAGAA |
| 6786 | UUCUUCUUUGACAAUGACAUU | 9390 | CAGUACACUAUGUGGUAGAAU |
| 6787 | UCUUCUUUGACAAUGACAUUC | 9391 | AGUACACUAUGUGGUAGAAUG |
| 6788 | CUUCUUUGACAAUGACAUUCA | 9392 | GUACACUAUGUGGUAGAAUGG |
| 6789 | UUCUUUGACAAUGACAUUCAC | 9393 | UACACUAUGUGGUAGAAUGGA |
| 6790 | UCUUUGACAAUGACAUUCACA | 9394 | ACACUAUGUGGUAGAAUGGAA |
| 6791 | CUUUGACAAUGACAUUCACAG | 9395 | CACUAUGUGGUAGAAUGGAAA |
| 6792 | UUUGACAAUGACAUUCACAGA | 9396 | ACUAUGUGGUAGAAUGGAAAG |
| 6793 | UUGACAAUGACAUUCACAGAG | 9397 | CUAUGUGGUAGAAUGGAAAGA |
| 6794 | UGACAAUGACAUUCACAGAGC | 9398 | UAUGUGGUAGAAUGGAAAGAG |
| 6795 | GACAAUGACAUUCACAGAGCU | 9399 | AUGUGGUAGAAUGGAAAGAGU |
| 6796 | ACAAUGACAUUCACAGAGCUC | 9400 | UGUGGUAGAAUGGAAAGAGUA |
| 6797 | CAAUGACAUUCACAGAGCUCU | 9401 | GUGGUAGAAUGGAAAGAGUAC |
| 6798 | AAUGACAUUCACAGAGCUCUG | 9402 | UGGUAGAAUGGAAAGAGUACC |
| 6799 | AUGACAUUCACAGAGCUCUGG | 9403 | GGUAGAAUGGAAAGAGUACCA |
| 6800 | UGACAUUCACAGAGCUCUGGC | 9404 | GUAGAAUGGAAAGAGUACCAG |
| 6801 | GACAUUCACAGAGCUCUGGCU | 9405 | UAGAAUGGAAAGAGUACCAGC |
| 6802 | ACAUUCACAGAGCUCUGGCUU | 9406 | AGAAUGGAAAGAGUACCAGCC |
| 6803 | CAUUCACAGAGCUCUGGCUUU | 9407 | GAAUGGAAAGAGUACCAGCCC |
| 6804 | AUUCACAGAGCUCUGGCUUUG | 9408 | AAUGGAAAGAGUACCAGCCCG |
| 6805 | UUCACAGAGCUCUGGCUUUGC | 9409 | AUGGAAAGAGUACCAGCCCGC |
| 6806 | UCACAGAGCUCUGGCUUUGCA | 9410 | UGGAAAGAGUACCAGCCCGCA |
| 6807 | CACAGAGCUCUGGCUUUGCAG | 9411 | GGAAAGAGUACCAGCCCGCAG |
| 6808 | ACAGAGCUCUGGCUUUGCAGG | 9412 | GAAAGAGUACCAGCCCGCAGA |
| 6809 | CAGAGCUCUGGCUUUGCAGGU | 9413 | AAAGAGUACCAGCCCGCAGAC |
| 6810 | AGAGCUCUGGCUUUGCAGGUU | 9414 | AAGAGUACCAGCCCGCAGACA |
| 6811 | GAGCUCUGGCUUUGCAGGUUC | 9415 | AGAGUACCAGCCCGCAGACAA |
| 6812 | AGCUCUGGCUUUGCAGGUUCC | 9416 | GAGUACCAGCCCGCAGACAAG |
| 6813 | GCUCUGGCUUUGCAGGUUCCU | 9417 | AGUACCAGCCCGCAGACAAGA |
| 6814 | CUCUGGCUUUGCAGGUUCCUC | 9418 | GUACCAGCCCGCAGACAAGAA |
| 6815 | UCUGGCUUUGCAGGUUCCUCU | 9419 | UACCAGCCCGCAGACAAGAAG |
| 6816 | CUGGCUUUGCAGGUUCCUCUC | 9420 | ACCAGCCCGCAGACAAGAAGA |
| 6817 | UGGCUUUGCAGGUUCCUCUCA | 9421 | CCAGCCCGCAGACAAGAAGAU |
| 6818 | GGCUUUGCAGGUUCCUCUCAU | 9422 | CAGCCCGCAGACAAGAAGAUC |
| 6819 | GCUUUGCAGGUUCCUCUCAUC | 9423 | AGCCCGCAGACAAGAAGAUCU |
| 6820 | CUUUGCAGGUUCCUCUCAUCU | 9424 | GCCCGCAGACAAGAAGAUCUC |
| 6821 | UUUGCAGGUUCCUCUCAUCUU | 9425 | CCCGCAGACAAGAAGAUCUCU |
| 6822 | UUGCAGGUUCCUCUCAUCUUU | 9426 | CCGCAGACAAGAAGAUCUCUG |
| 6823 | UGCAGGUUCCUCUCAUCUUUG | 9427 | CGCAGACAAGAAGAUCUCUGA |
| 6824 | GCAGGUUCCUCUCAUCUUUGA | 9428 | GCAGACAAGAAGAUCUCUGAG |
| 6825 | CAGGUUCCUCUCAUCUUUGAC | 9429 | CAGACAAGAAGAUCUCUGAGU |
| 6826 | AGGUUCCUCUCAUCUUUGACA | 9430 | AGACAAGAAGAUCUCUGAGUU |
| 6827 | GGUUCCUCUCAUCUUUGACAG | 9431 | GACAAGAAGAUCUCUGAGUUU |
| 6828 | GUUCCUCUCAUCUUUGACAGU | 9432 | ACAAGAAGAUCUCUGAGUUUU |
| 6829 | UUCCUCUCAUCUUUGACAGUC | 9433 | CAAGAAGAUCUCUGAGUUUUA |
| 6830 | UCCUCUCAUCUUUGACAGUCA | 9434 | AAGAAGAUCUCUGAGUUUUAG |
| 6831 | CCUCUCAUCUUUGACAGUCAA | 9435 | AGAAGAUCUCUGAGUUUUAGU |
| 6832 | CUCUCAUCUUUGACAGUCAAG | 9436 | GAAGAUCUCUGAGUUUUAGUU |
| 6833 | UCUCAUCUUUGACAGUCAAGG | 9437 | AAGAUCUCUGAGUUUUAGUUG |
| 6834 | CUCAUCUUUGACAGUCAAGGU | 9438 | AGAUCUCUGAGUUUUAGUUGC |
| 6835 | UCAUCUUUGACAGUCAAGGUG | 9439 | GAUCUCUGAGUUUUAGUUGCA |
| 6836 | CAUCUUUGACAGUCAAGGUGA | 9440 | AUCUCUGAGUUUUAGUUGCAG |
| 6837 | AUCUUUGACAGUCAAGGUGAA | 9441 | UCUCUGAGUUUUAGUUGCAGU |
| 6838 | UCUUUGACAGUCAAGGUGAAC | 9442 | CUCUGAGUUUUAGUUGCAGUU |
| 6839 | CUUUGACAGUCAAGGUGAACA | 9443 | UCUGAGUUUUAGUUGCAGUUC |
| 6840 | UUUGACAGUCAAGGUGAACAC | 9444 | CUGAGUUUUAGUUGCAGUUCU |
| 6841 | UUGACAGUCAAGGUGAACACA | 9445 | UGAGUUUUAGUUGCAGUUCUG |
| 6842 | UGACAGUCAAGGUGAACACAU | 9446 | GAGUUUUAGUUGCAGUUCUGC |
| 6843 | GACAGUCAAGGUGAACACAUA | 9447 | AGUUUUAGUUGCAGUUCUGCU |
| 6844 | ACAGUCAAGGUGAACACAUAG | 9448 | GUUUUAGUUGCAGUUCUGCUA |
| 6845 | CAGUCAAGGUGAACACAUAGG | 9449 | UUUUAGUUGCAGUUCUGCUAC |
| 6846 | AGUCAAGGUGAACACAUAGGU | 9450 | UUUAGUUGCAGUUCUGCUACU |
| 6847 | GUCAAGGUGAACACAUAGGUC | 9451 | UUAGUUGCAGUUCUGCUACUA |
| 6848 | UCAAGGUGAACACAUAGGUCC | 9452 | UAGUUGCAGUUCUGCUACUAA |
| 6849 | CAAGGUGAACACAUAGGUCCC | 9453 | AGUUGCAGUUCUGCUACUAAC |
| 6850 | AAGGUGAACACAUAGGUCCCC | 9454 | GUUGCAGUUCUGCUACUAACA |
| 6851 | AGGUGAACACAUAGGUCCCCA | 9455 | UUGCAGUUCUGCUACUAACAG |
| 6852 | GGUGAACACAUAGGUCCCCAC | 9456 | UGCAGUUCUGCUACUAACAGC |
| 6853 | GUGAACACAUAGGUCCCCACU | 9457 | GCAGUUCUGCUACUAACAGCU |
| 6854 | UGAACACAUAGGUCCCCACUU | 9458 | CAGUUCUGCUACUAACAGCUU |
| 6855 | GAACACAUAGGUCCCCACUUG | 9459 | AGUUCUGCUACUAACAGCUUU |
| 6856 | AACACAUAGGUCCCCACUUGC | 9460 | GUUCUGCUACUAACAGCUUUG |
| 6857 | ACACAUAGGUCCCCACUUGCA | 9461 | UUCUGCUACUAACAGCUUUGU |
| 6858 | CACAUAGGUCCCCACUUGCAG | 9462 | UCUGCUACUAACAGCUUUGUG |
| 6859 | ACAUAGGUCCCCACUUGCAGC | 9463 | CUGCUACUAACAGCUUUGUGA |
| 6860 | CAUAGGUCCCCACUUGCAGCC | 9464 | UGCUACUAACAGCUUUGUGAC |
| 6861 | AUAGGUCCCCACUUGCAGCCC | 9465 | GCUACUAACAGCUUUGUGACU |
| 6862 | UAGGUCCCCACUUGCAGCCCA | 9466 | CUACUAACAGCUUUGUGACUU |
| 6863 | AGGUCCCCACUUGCAGCCCAG | 9467 | UACUAACAGCUUUGUGACUUU |
| 6864 | GGUCCCCACUUGCAGCCCAGU | 9468 | ACUAACAGCUUUGUGACUUUG |
| 6865 | GUCCCCACUUGCAGCCCAGUC | 9469 | CUAACAGCUUUGUGACUUUGA |
| 6866 | UCCCCACUUGCAGCCCAGUCA | 9470 | UAACAGCUUUGUGACUUUGAC |
| 6867 | CCCCACUUGCAGCCCAGUCAC | 9471 | AACAGCUUUGUGACUUUGACC |
| 6868 | CCCACUUGCAGCCCAGUCACA | 9472 | ACAGCUUUGUGACUUUGACCA |
| 6869 | CCACUUGCAGCCCAGUCACAG | 9473 | CAGCUUUGUGACUUUGACCAA |
| 6870 | CACUUGCAGCCCAGUCACAGU | 9474 | AGCUUUGUGACUUUGACCAAA |
| 6871 | ACUUGCAGCCCAGUCACAGUA | 9475 | GCUUUGUGACUUUGACCAAAC |
| 6872 | CUUGCAGCCCAGUCACAGUAG | 9476 | CUUUGUGACUUUGACCAAACA |
| 6873 | UUGCAGCCCAGUCACAGUAGC | 9477 | UUUGUGACUUUGACCAAACAC |
| 6874 | UGCAGCCCAGUCACAGUAGCA | 9478 | UUGUGACUUUGACCAAACACA |
| 6875 | GCAGCCCAGUCACAGUAGCAA | 9479 | UGUGACUUUGACCAAACACAC |
| 6876 | CAGCCCAGUCACAGUAGCAAC | 9480 | GUGACUUUGACCAAACACACU |
| 6877 | AGCCCAGUCACAGUAGCAACA | 9481 | UGACUUUGACCAAACACACUU |
| 6878 | GCCCAGUCACAGUAGCAACAC | 9482 | GACUUUGACCAAACACACUUU |
| 6879 | CCCAGUCACAGUAGCAACACU | 9483 | ACUUUGACCAAACACACUUUC |
| 6880 | CCAGUCACAGUAGCAACACUG | 9484 | CUUUGACCAAACACACUUUCU |
| 6881 | CAGUCACAGUAGCAACACUGC | 9485 | UUUGACCAAACACACUUUCUU |
| 6882 | AGUCACAGUAGCAACACUGCU | 9486 | UUGACCAAACACACUUUCUUA |
| 6883 | GUCACAGUAGCAACACUGCUG | 9487 | UGACCAAACACACUUUCUUAC |
| 6884 | UCACAGUAGCAACACUGCUGU | 9488 | GACCAAACACACUUUCUUACU |
| 6885 | CACAGUAGCAACACUGCUGUU | 9489 | ACCAAACACACUUUCUUACUU |
| 6886 | ACAGUAGCAACACUGCUGUUA | 9490 | CCAAACACACUUUCUUACUUU |
| 6887 | CAGUAGCAACACUGCUGUUAG | 9491 | CAAACACACUUUCUUACUUUU |
| 6888 | AGUAGCAACACUGCUGUUAGC | 9492 | AAACACACUUUCUUACUUUUG |
| 6889 | GUAGCAACACUGCUGUUAGCA | 9493 | AACACACUUUCUUACUUUUGA |
| 6890 | UAGCAACACUGCUGUUAGCAU | 9494 | ACACACUUUCUUACUUUUGAG |
| 6891 | AGCAACACUGCUGUUAGCAUU | 9495 | CACACUUUCUUACUUUUGAGG |
| 6892 | GCAACACUGCUGUUAGCAUUC | 9496 | ACACUUUCUUACUUUUGAGGA |
| 6893 | CAACACUGCUGUUAGCAUUCU | 9497 | CACUUUCUUACUUUUGAGGAG |
| 6894 | AACACUGCUGUUAGCAUUCUC | 9498 | ACUUUCUUACUUUUGAGGAGA |
| 6895 | ACACUGCUGUUAGCAUUCUCG | 9499 | CUUUCUUACUUUUGAGGAGAA |
| 6896 | CACUGCUGUUAGCAUUCUCGA | 9500 | UUUCUUACUUUUGAGGAGAAG |
| 6897 | ACUGCUGUUAGCAUUCUCGAG | 9501 | UUCUUACUUUUGAGGAGAAGA |
| 6898 | CUGCUGUUAGCAUUCUCGAGC | 9502 | UCUUACUUUUGAGGAGAAGAG |
| 6899 | UGCUGUUAGCAUUCUCGAGCU | 9503 | CUUACUUUUGAGGAGAAGAGG |
| 6900 | GCUGUUAGCAUUCUCGAGCUG | 9504 | UUACUUUUGAGGAGAAGAGGU |
| 6901 | CUGUUAGCAUUCUCGAGCUGC | 9505 | UACUUUUGAGGAGAAGAGGUU |
| 6902 | UGUUAGCAUUCUCGAGCUGCA | 9506 | ACUUUUGAGGAGAAGAGGUUG |
| 6903 | GUUAGCAUUCUCGAGCUGCAC | 9507 | CUUUUGAGGAGAAGAGGUUGC |

[0263] This description and exemplary embodiments should not be taken as limiting. For the purposes of this specification and appended claims, unless otherwise indicated, all numbers expressing quantities, percentages, or proportions, and other numerical values used in the specification and claims, are to be understood as being modified in all instances by the term “about,” to the extent they are not already so modified. Accordingly, unless indicated to the contrary, the numerical parameters set forth in the following specification and attached claims are approximations that may vary depending upon the desired properties sought to be obtained. At the very least, and not as an attempt to limit the application of the doctrine of equivalents to the scope of the claims, each numerical parameter should at least be construed in light of the number of reported significant digits and by applying ordinary rounding techniques.

[0264] It is noted that, as used in this specification and the appended claims, the singular forms “a,” “an,” and “the,” and any singular use of any word, include plural referents unless expressly and unequivocally limited to one referent. As used herein, the term “include” and its grammatical variants are intended to be non-limiting, such that recitation of items in a list is not to the exclusion of other like items that can be substituted or added to the listed items.

The application's sequence listing, which the Patent Office published only in electronic form, follows.

SEQUENCE LISTING (9625 sequences)

SEQ ID NO: 1 - DNA, 22 bp, synthetic construct
  misc_feature 1..22: note = Synthetic
  source 1..22: mol_type = other DNA
gcaatgctgctgtcttcttgct

SEQ ID NO: 2 - DNA, 22 bp, synthetic construct
  misc_feature 1..22: note = Synthetic
  source 1..22: mol_type = other DNA
aacaaaatgtacaaggaccgac

SEQ ID NO: 3 - DNA, 22 bp, synthetic construct
  misc_feature 1..22: note = Synthetic
  source 1..22: mol_type = other DNA
tgcaaagtgcaacgcctgtgga

SEQ ID NO: 4 - DNA, 22 bp, synthetic construct
  misc_feature 1..22: note = Synthetic
  source 1..22: mol_type = other DNA
atagtctacaacaaagctcagg

SEQ ID NO: 5 - DNA, 22 bp, synthetic construct
  misc_feature 1..22: note = Synthetic
  source 1..22: mol_type = other DNA
ctgttttaaaatttttatatta

SEQ ID NO: 6 - DNA, 22 bp, synthetic construct
  misc_feature 1..22: note = Synthetic
  source 1..22: mol_type = other DNA
atttagcatgttcccaattctc

SEQ ID NO: 7 - DNA, 22 bp, synthetic construct
  misc_feature 1..22: note = Synthetic
  source 1..22: mol_type = other DNA
aatcgcctgcaggtaaaagcat

SEQ ID NO: 8 - DNA, 22 bp, synthetic construct
  misc_feature 1..22: note = Synthetic
  source 1..22: mol_type = other DNA
tctcagaaagacacaaattcct

SEQ ID NO: 9 - DNA, 22 bp, synthetic construct
  misc_feature 1..22: note = Synthetic
  source 1..22: mol_type = other DNA
tcaggcttcccaatttttcctg

SEQ ID NO: 10 - DNA, 22 bp, synthetic construct
  misc_feature 1..22: note = Synthetic
  source 1..22: mol_type = other DNA
tagaatactggcatctgttttt

SEQ ID NO: 11 - DNA, 22 bp, synthetic construct
  misc_feature 1..22: note = Synthetic
  source 1..22: mol_type = other DNA
tggcatctgtttttgaggattg

SEQ ID NO: 12 - DNA, 22 bp, synthetic construct
  misc_feature 1..22: note = Synthetic
  source 1..22: mol_type = other DNA
ttgccgctgcccaatgccatcc

SEQ ID NO: 13 - DNA, 22 bp, synthetic construct
  misc_feature 1..22: note = Synthetic
  source 1..22: mol_type = other DNA
gaggtagggcgacagatctaat

SEQ ID NO: 14 - DNA, 22 bp, synthetic construct
  misc_feature 1..22: note = Synthetic
  source 1..22: mol_type = other DNA
tctacaggaaaaattgggaagc

SEQ ID NO: 15 - DNA, 22 bp, synthetic construct
  misc_feature 1..22: note = Synthetic
  source 1..22: mol_type = other DNA
gcggcaaactgttgtcagaaca

SEQ ID NO: 16 - DNA, 22 bp, synthetic construct
  misc_feature 1..22: note = Synthetic
  source 1..22: mol_type = other DNA
ttttggtatcttacaggaactc

SEQ ID NO: 17 - DNA, 22 bp, synthetic construct
  misc_feature 1..22: note = Synthetic
  source 1..22: mol_type = other DNA
actattggagcctgtaagtata

SEQ ID NO: 18 - DNA, 22 bp, synthetic construct
  misc_feature 1..22: note = Synthetic
  source 1..22: mol_type = other DNA
aggaagttagaagatctgagct

SEQ ID NO: 19 - DNA, 22 bp, synthetic construct
  misc_feature 1..22: note = Synthetic
  source 1..22: mol_type = other DNA
tagtaaccacaggttgtgtcac

SEQ ID NO: 20 - DNA, 22 bp, synthetic construct
  misc_feature 1..22: note = Synthetic
  source 1..22: mol_type = other DNA
gttgtgtcaccagagtaacagt

SEQ ID NO: 21 - DNA, 22 bp, synthetic construct
  misc_feature 1..22: note = Synthetic
  source 1..22: mol_type = other DNA
tctgagtaggagctaaaatatt

SEQ ID NO: 22 - DNA, 22 bp, synthetic construct
  misc_feature 1..22: note = Synthetic
  source 1..22: mol_type = other DNA
gagggtgatggtgggtgacctt

SEQ ID NO: 23 - DNA, 22 bp, synthetic construct
  misc_feature 1..22: note = Synthetic
  source 1..22: mol_type = other DNA
tataaaatcacagagggtgatg

SEQ ID NO: 24 - DNA, 22 bp, synthetic construct
  misc_feature 1..22: note = Synthetic
  source 1..22: mol_type = other DNA
ttgatcaagttataaaatcaca

SEQ ID NO: 25 - DNA, 22 bp, synthetic construct
  misc_feature 1..22: note = Synthetic
  source 1..22: mol_type = other DNA
ccttggtttctgtgattttctt

SEQ ID NO: 26 - DNA, 22 bp, synthetic construct
  misc_feature 1..22: note = Synthetic
  source 1..22: mol_type = other DNA
tccttagcttccagccattgtg

SEQ ID NO: 27 - DNA, 22 bp, synthetic construct
  misc_feature 1..22: note = Synthetic
  source 1..22: mol_type = other DNA
cttgtacttcatcccactgatt

SEQ ID NO: 28 - DNA, 22 bp, synthetic construct
  misc_feature 1..22: note = Synthetic
  source 1..22: mol_type = other DNA
actgattctgaattctttcaac

SEQ ID NO: 29 - DNA, 22 bp, synthetic construct
  misc_feature 1..22: note = Synthetic
  source 1..22: mol_type = other DNA
agccaagcttgagtcatggaag

SEQ ID NO: 30 - DNA, 22 bp, synthetic construct
  misc_feature 1..22: note = Synthetic
  source 1..22: mol_type = other DNA
ttaggacaggccagagccaagc

SEQ ID NO: 31 - DNA, 22 bp, synthetic construct
  misc_feature 1..22: note = Synthetic
  source 1..22: mol_type = other DNA
gcaacagttgaatgaaatgtta

SEQ ID NO: 32 - DNA, 22 bp, synthetic construct
  misc_feature 1..22: note = Synthetic
  source 1..22: mol_type = other DNA
ccttcagaaccggaggcaacag

SEQ ID NO: 33 - DNA, 22 bp, synthetic construct
  misc_feature 1..22: note = Synthetic
  source 1..22: mol_type = other DNA
agttgaaagaattcagaatcag

SEQ ID NO: 34 - DNA, 22 bp, synthetic construct
  misc_feature 1..22: note = Synthetic
  source 1..22: mol_type = other DNA
ttttattctagttgaaagaatt

SEQ ID NO: 35 - DNA, 22 bp, synthetic construct
  misc_feature 1..22: note = Synthetic
  source 1..22: mol_type = other DNA
tttttccttttattctagttga

SEQ ID NO: 36-99 - skipped (64 entries)

SEQ ID NO: 100 - DNA, 22 bp, synthetic construct
  misc_feature 1..22: note = Synthetic
  source 1..22: mol_type = other DNA
atatatgtgttacctacccttg

SEQ ID NO: 101 - DNA, 22 bp, synthetic construct
  misc_feature 1..22: note = Synthetic
  source 1..22: mol_type = other DNA
acattttgttaactttttccca

SEQ ID NO: 102 - DNA, 22 bp, synthetic construct
  misc_feature 1..22: note = Synthetic
  source 1..22: mol_type = other DNA
ctttttcccattggaaatcaag

SEQ ID NO: 103 - DNA, 22 bp, synthetic construct
  misc_feature 1..22: note = Synthetic
  source 1..22: mol_type = other DNA
tttttcccattggaaatcaagc

SEQ ID NO: 104 - DNA, 22 bp, synthetic construct
  misc_feature 1..22: note = Synthetic
  source 1..22: mol_type = other DNA
tcctgtagcttcaccctttcca

SEQ ID NO: 105 - DNA, 22 bp, synthetic construct
  misc_feature 1..22: note = Synthetic
  source 1..22: mol_type = other DNA
aatgtacaaggaccgacaaggg

SEQ ID NO: 106 - DNA, 22 bp, synthetic construct
  misc_feature 1..22: note = Synthetic
  source 1..22: mol_type = other DNA
acaaaatgtacaaggaccgaca

SEQ ID NO: 107 - DNA, 22 bp, synthetic construct
  misc_feature 1..22: note = Synthetic
  source 1..22: mol_type = other DNA
aacaaaatgtacaaggaccgac

SEQ ID NO: 108 - DNA, 22 bp, synthetic construct
  misc_feature 1..22: note = Synthetic
  source 1..22: mol_type = other DNA
ggaaaaagttaacaaaatgtac

SEQ ID NO: 109 - DNA, 22 bp, synthetic construct
  misc_feature 1..22: note = Synthetic
  source 1..22: mol_type = other DNA
tctctcccagcttgatttccaa

SEQ ID NO: 110 - DNA, 22 bp, synthetic construct
  misc_feature 1..22: note = Synthetic
  source 1..22: mol_type = other DNA
ctctctcccagcttgatttcca

SEQ ID NO: 111 - DNA, 22 bp, synthetic construct
  misc_feature 1..22: note = Synthetic
  source 1..22: mol_type = other DNA
gcctgtggaaagggtgaagcta

SEQ ID NO: 112 - DNA, 22 bp, synthetic construct
  misc_feature 1..22: note = Synthetic
  source 1..22: mol_type = other DNA
gcaaagtgcaacgcctgtggaa

SEQ ID NO: 113 - DNA, 22 bp, synthetic construct
  misc_feature 1..22: note = Synthetic
  source 1..22: mol_type = other DNA
tgcaaagtgcaacgcctgtgga

SEQ ID NO: 114 - DNA, 22 bp, synthetic construct
  misc_feature 1..22: note = Synthetic
  source 1..22: mol_type = other DNA
agcattgcaaagtgcaacgcct

SEQ ID NO: 115 - DNA, 22 bp, synthetic construct
  misc_feature 1..22: note = Synthetic
  source 1..22: mol_type = other DNA
atagtctacaacaaagctcagg

SEQ ID NO: 116 - DNA, 22 bp, synthetic construct
  misc_feature 1..22: note = Synthetic
  source 1..22: mol_type = other DNA
aaagatagtctacaacaaagct

SEQ ID NO: 117 - DNA, 22 bp, synthetic construct
  misc_feature 1..22: note = Synthetic
  source 1..22: mol_type = other DNA
tatttagcatgttcccaattct

SEQ ID NO: 118 - DNA, 22 bp, synthetic construct
  misc_feature 1..22: note = Synthetic
  source 1..22: mol_type = other DNA
aacagatctgtcaaatcgcctg

SEQ ID NO: 119 - DNA, 22 bp, synthetic construct
  misc_feature 1..22: note = Synthetic
  source 1..22: mol_type = other DNA
aatcgcctgcaggtaaaagcat

SEQ ID NO: 120 - DNA, 22 bp, synthetic construct
  misc_feature 1..22: note = Synthetic
  source 1..22: mol_type = other DNA
tgctaaatacaaatggtatctt

SEQ ID NO: 121 - DNA, 22 bp, synthetic construct
  misc_feature 1..22: note = Synthetic
  source 1..22: mol_type = other DNA
attgggaacatgctaaatacaa

SEQ ID NO: 122 - DNA, 22 bp, synthetic construct
  misc_feature 1..22: note = Synthetic
  source 1..22: mol_type = other DNA
aaagacacaaattcctgagaat

SEQ ID NO: 123 - DNA, 22 bp, synthetic construct
  misc_feature 1..22: note = Synthetic
  source 1..22: mol_type = other DNA
gaaagacacaaattcctgagaa

SEQ ID NO: 124 - DNA, 22 bp, synthetic construct
  misc_feature 1..22: note = Synthetic
  source 1..22: mol_type = other DNA
atgatataaagatatttaatca

SEQ ID NO: 125 - DNA, 22 bp, synthetic construct
  misc_feature 1..22: note = Synthetic
  source 1..22: mol_type = other DNA
ttgacagatctgttgagaaatg

SEQ ID NO: 126 - DNA, 22 bp, synthetic construct
  misc_feature 1..22: note = Synthetic
  source 1..22: mol_type = other DNA
gatttgacagatctgttgagaa

SEQ ID NO: 127 - DNA, 22 bp, synthetic construct
  misc_feature 1..22: note = Synthetic
  source 1..22: mol_type = other DNA
ttgatccatatgcttttacctg

SEQ ID NO: 128 - DNA, 22 bp, synthetic construct
  misc_feature 1..22: note = Synthetic
  source 1..22: mol_type = other DNA
agacctcctgccaccgcagatt

SEQ ID NO: 129 - DNA, 22 bp, synthetic construct
  misc_feature 1..22: note = Synthetic
  source 1..22: mol_type = other DNA
tcccaatttttcctgtagaata

SEQ ID NO: 130 - DNA, 22 bp, synthetic construct
  misc_feature 1..22: note = Synthetic
  source 1..22: mol_type = other DNA
tagaatactggcatctgttttt

SEQ ID NO: 131 - DNA, 22 bp, synthetic construct
  misc_feature 1..22: note = Synthetic
  source 1..22: mol_type = other DNA
tttgccgctgcccaatgccatc

SEQ ID NO: 132 - DNA, 22 bp, synthetic construct
  misc_feature 1..22: note = Synthetic
  source 1..22: mol_type = other DNA
ggagttcctgtaagataccaaa

SEQ ID NO: 133 - DNA, 22 bp, synthetic construct
  misc_feature 1..22: note = Synthetic
  source 1..22: mol_type = other DNA
agaggtagggcgacagatctaa

SEQ ID NO: 134 - DNA, 22 bp, synthetic construct
  misc_feature 1..22: note = Synthetic
  source 1..22: mol_type = other DNA
ctgtcagacagaaaaaagaggt

SEQ ID NO: 135 - DNA, 22 bp, synthetic construct
  misc_feature 1..22: note = Synthetic
  source 1..22: mol_type = other DNA
gctgtcagacagaaaaaagagg

SEQ ID NO: 136 - DNA, 22 bp, synthetic construct
  misc_feature 1..22: note = Synthetic
  source 1..22: mol_type = other DNA
aacagctgtcagacagaaaaaa

SEQ ID NO: 137 - DNA, 22 bp, synthetic construct
  misc_feature 1..22: note = Synthetic
  source 1..22: mol_type = other DNA
aagcctgaatctgcggtggcag

SEQ ID NO: 138 - DNA, 22 bp, synthetic construct
  misc_feature 1..22: note = Synthetic
  source 1..22: mol_type = other DNA
gggaagcctgaatctgcggtgg

SEQ ID NO: 139 - DNA, 22 bp, synthetic construct
  misc_feature 1..22: note = Synthetic
  source 1..22: mol_type = other DNA
aattgggaagcctgaatctgcg

SEQ ID NO: 140 - DNA, 22 bp, synthetic construct
  misc_feature 1..22: note = Synthetic
  source 1..22: mol_type = other DNA
aaaaattgggaagcctgaatct

SEQ ID NO: 141 - DNA, 22 bp, synthetic construct
  misc_feature 1..22: note = Synthetic
  source 1..22: mol_type = other DNA
gccagtattctacaggaaaaat

SEQ ID NO: 142 - DNA, 22 bp, synthetic construct
  misc_feature 1..22: note = Synthetic
  source 1..22: mol_type = other DNA
tgccagtattctacaggaaaaa

SEQ ID NO: 143 - DNA, 22 bp, synthetic construct
  misc_feature 1..22: note = Synthetic
  source 1..22: mol_type = other DNA
aaaaacagatgccagtattcta

SEQ ID NO: 144 - DNA, 22 bp, synthetic construct
  misc_feature 1..22: note = Synthetic
  source 1..22: mol_type = other DNA
tgtcagaacattgaatgcaact

SEQ ID NO: 145 - DNA, 22 bp, synthetic construct
  misc_feature 1..22: note = Synthetic
  source 1..22: mol_type = other DNA
ttgtcagaacattgaatgcaac

SEQ ID NO: 146 - DNA, 22 bp, synthetic construct
  misc_feature 1..22: note = Synthetic
  source 1..22: mol_type = other DNA
gttgtcagaacattgaatgcaa

SEQ ID NO: 147 - DNA, 22 bp, synthetic construct
  misc_feature 1..22: note = Synthetic
  source 1..22: mol_type = other DNA
aactccaggatggcattgggca

SEQ ID NO: 148 - DNA, 22 bp, synthetic construct
  misc_feature 1..22: note = Synthetic
  source 1..22: mol_type = other DNA
tacaggaactccaggatggcat

SEQ ID NO: 149 - DNA, 22 bp, synthetic construct
  misc_feature 1..22: note = Synthetic
  source 1..22: mol_type = other DNA
ttacaggaactccaggatggca

SEQ ID NO: 150 - DNA, 22 bp, synthetic construct
  misc_feature 1..22: note = Synthetic
  source 1..22: mol_type = other DNA
ggtatcttacaggaactccagg

SEQ ID NO: 151 - DNA, 22 bp, synthetic construct
  misc_feature 1..22: note = Synthetic
  source 1..22: mol_type = other DNA
ttttggtatcttacaggaactc

SEQ ID NO: 152 - DNA, 22 bp, synthetic construct
  misc_feature 1..22: note = Synthetic
  source 1..22: mol_type = other DNA
gttttgcctttttggtatctta

SEQ ID NO: 153 - DNA, 22 bp, synthetic construct
  misc_feature 1..22: note = Synthetic
  source 1..22: mol_type = other DNA
tcttttctcaaataaaaagaca

SEQ ID NO: 154 - DNA, 22 bp, synthetic construct
  misc_feature 1..22: note = Synthetic
  source 1..22: mol_type = other DNA
agaatgggatccagtatactta

SEQ ID NO: 155 - DNA, 22 bp, synthetic construct
  misc_feature 1..22: note = Synthetic
  source 1..22: mol_type = other DNA
agtatacttacaggctccaata

SEQ ID NO: 156 - DNA, 22 bp, synthetic construct
  misc_feature 1..22: note = Synthetic
  source 1..22: mol_type = other DNA
caggctccaatagtggtcagtc

SEQ ID NO: 157 - DNA, 22 bp, synthetic construct
  misc_feature 1..22: note = Synthetic
  source 1..22: mol_type = other DNA
caatagtggtcagtccaggagc

SEQ ID NO: 158 - DNA, 22 bp, synthetic construct
  misc_feature 1..22: note = Synthetic
  source 1..22: mol_type = other DNA
gtggtcagtccaggagctaggt

SEQ ID NO: 159 - DNA, 22 bp, synthetic construct
  misc_feature 1..22: note = Synthetic
  source 1..22: mol_type = other DNA
ttgccctcagctcttgaagtaa

SEQ ID NO: 160 - DNA, 22 bp, synthetic construct
  misc_feature 1..22: note = Synthetic
  source 1..22: mol_type = other DNA
agtatactggatcccattctct

SEQ ID NO: 161 - DNA, 22 bp, synthetic construct
  misc_feature 1..22: note = Synthetic
  source 1..22: mol_type = other DNA
actattggagcctgtaagtata

SEQ ID NO: 162 - DNA, 22 bp, synthetic construct
  misc_feature 1..22: note = Synthetic
  source 1..22: mol_type = other DNA
ctagctcctggactgaccacta

SEQ ID NO: 163 - DNA, 22 bp, synthetic construct
  misc_feature 1..22: note = Synthetic
  source 1..22: mol_type = other DNA
gcaaagcagcctgacctagctc

SEQ ID NO: 164 - DNA, 22 bp, synthetic construct
  misc_feature 1..22: note = Synthetic
  source 1..22: mol_type = other DNA
aaaccgtttacttcaagagctg

SEQ ID NO: 165 - DNA, 22 bp, synthetic construct
  misc_feature 1..22: note = Synthetic
  source 1..22: mol_type = other DNA
taaaccgtttacttcaagagct

SEQ ID NO: 166 - DNA, 22 bp, synthetic construct
  misc_feature 1..22: note = Synthetic
  source 1..22: mol_type = other DNA
agatctgagctctgagtggaag

SEQ ID NO: 167 - DNA, 22 bp, synthetic construct
  misc_feature 1..22: note = Synthetic
  source 1..22: mol_type = other DNA
agaagatctgagctctgagtgg

SEQ ID NO: 168 - DNA, 22 bp, synthetic construct
  misc_feature 1..22: note = Synthetic
  source 1..22: mol_type = other DNA
agttagaagatctgagctctga

SEQ ID NO: 169 - DNA, 22 bp, synthetic construct
  misc_feature 1..22: note = Synthetic
  source 1..22: mol_type = other DNA
atgtgtatgcttttctgttaaa

SEQ ID NO: 170 - DNA, 22 bp, synthetic construct
  misc_feature 1..22: note = Synthetic
  source 1..22: mol_type = other DNA
tgatcatctcgttgatatcctc

SEQ ID NO: 171 - DNA, 22 bp, synthetic construct
  misc_feature 1..22: note = Synthetic
  source 1..22: mol_type = other DNA
ttgatcaagcagagaaagccag

SEQ ID NO: 172 - DNA, 22 bp, synthetic construct
  misc_feature 1..22: note = Synthetic
  source 1..22: mol_type = other DNA
agtcggtaagttctgtccaagc

SEQ ID NO: 173 - DNA, 22 bp, synthetic construct
  misc_feature 1..22: note = Synthetic
  source 1..22: mol_type = other DNA
gcccggttgaaatctgccagag

SEQ ID NO: 174 - DNA, 22 bp, synthetic construct
  misc_feature 1..22: note = Synthetic
  source 1..22: mol_type = other DNA
cagagcaggtacctccaacatc

SEQ ID NO: 175 - DNA, 22 bp, synthetic construct
  misc_feature 1..22: note = Synthetic
  source 1..22: mol_type = other DNA
ggtacctccaacatcaaggaag

SEQ ID NO: 176 - DNA, 22 bp, synthetic construct
  misc_feature 1..22: note = Synthetic
  source 1..22: mol_type = other DNA
caaggaagatggcatttctagt

SEQ ID NO: 177 - DNA, 22 bp, synthetic construct
  misc_feature 1..22: note = Synthetic
  source 1..22: mol_type = other DNA
agatggcatttctagtttggag

SEQ ID NO: 178 - DNA, 22 bp, synthetic construct
  misc_feature 1..22: note = Synthetic
  source 1..22: mol_type = other DNA
atggcagtttccttagtaacca

SEQ ID NO: 179 - DNA, 22 bp, synthetic construct
  misc_feature 1..22: note = Synthetic
  source 1..22: mol_type = other DNA
gtcaccagagtaacagtctgag

SEQ ID NO: 180 - DNA, 22 bp, synthetic construct
  misc_feature 1..22: note = Synthetic
  source 1..22: mol_type = other DNA
tctgagtaggagctaaaatatt

SEQ ID NO: 181 - DNA, 22 bp, synthetic construct
  misc_feature 1..22: note = Synthetic
  source 1..22: mol_type = other DNA
ctgagtaggagctaaaatattt

SEQ ID NO: 182 - DNA, 22 bp, synthetic construct
  misc_feature 1..22: note = Synthetic
  source 1..22: mol_type = other DNA
aaatattttgggtttttgcaaa

SEQ ID NO: 183 - DNA, 22 bp, synthetic construct
  misc_feature 1..22: note = Synthetic
  source 1..22: mol_type = other DNA
gtatgagaaaaaatgataaaag

SEQ ID NO: 184 - DNA, 22 bp, synthetic construct
  misc_feature 1..22: note = Synthetic
  source 1..22: mol_type = other DNA
caacgagatgatcatcaagcag

SEQ ID NO: 185 - DNA, 22 bp, synthetic construct
  misc_feature 1..22: note = Synthetic
  source 1..22: mol_type = other DNA
gagggtgatggtgggtgacctt

SEQ ID NO: 186 - DNA, 22 bp, synthetic construct
  misc_feature 1..22: note = Synthetic
  source 1..22: mol_type = other DNA
ataaaatcacagagggtgatgg

SEQ ID NO: 187 - DNA, 22 bp, synthetic construct
  misc_feature 1..22: note = Synthetic
  source 1..22: mol_type = other DNA
tataaaatcacagagggtgatg

SEQ ID NO: 188 - DNA, 22 bp, synthetic construct
  misc_feature 1..22: note = Synthetic
  source 1..22: mol_type = other DNA
agttataaaatcacagagggtg

SEQ ID NO: 189 - DNA, 22 bp, synthetic construct
  misc_feature 1..22: note = Synthetic
  source 1..22: mol_type = other DNA
tgatcaagttataaaatcacag

SEQ ID NO: 190 - DNA, 22 bp, synthetic construct
  misc_feature 1..22: note = Synthetic
  source 1..22: mol_type = other DNA
ttgatcaagttataaaatcaca

SEQ ID NO: 191 - DNA, 22 bp, synthetic construct
  misc_feature 1..22: note = Synthetic
  source 1..22: mol_type = other DNA
gggcttggacagaacttaccga

SEQ ID NO: 192 - DNA, 22 bp, synthetic construct
  misc_feature 1..22: note = Synthetic
  source 1..22: mol_type = other DNA
ctctggcagatttcaaccgggc

SEQ ID NO: 193 - DNA, 22 bp, synthetic construct
  misc_feature 1..22: note = Synthetic
  source 1..22: mol_type = other DNA
acctgctctggcagatttcaac

SEQ ID NO: 194 - DNA, 22 bp, synthetic construct
  misc_feature 1..22: note = Synthetic
  source 1..22: mol_type = other DNA
tacctgctctggcagatttcaa

SEQ ID NO: 195 - DNA, 22 bp, synthetic construct
  misc_feature 1..22: note = Synthetic
  source 1..22: mol_type = other DNA
cttgatgttggaggtacctgct

SEQ ID NO: 196 - DNA, 22 bp, synthetic construct
  misc_feature 1..22: note = Synthetic
  source 1..22: mol_type = other DNA
aatgccatcttccttgatgttg

SEQ ID NO: 197 - DNA, 22 bp, synthetic construct
  misc_feature 1..22: note = Synthetic
  source 1..22: mol_type = other DNA
agaaatgccatcttccttgatg

SEQ ID NO: 198 - DNA, 22 bp, synthetic construct
  misc_feature 1..22: note = Synthetic
  source 1..22: mol_type = other DNA
ggtgacacaacctgtggttact

SEQ ID NO: 199 - DNA, 22 bp, synthetic construct
  misc_feature 1..22: note = Synthetic
  source 1..22: mol_type = other DNA
tgttactctggtgacacaacct

SEQ ID NO: 200 - DNA, 22 bp, synthetic construct
  misc_feature 1..22: note = Synthetic
  source 1..22: mol_type = other DNA
agctcctactcagactgttact

SEQ ID NO: 201 - DNA, 22 bp, synthetic construct
  misc_feature 1..22: note = Synthetic
  source 1..22: mol_type = other DNA
aaaggtatctttgatactaacc

SEQ ID NO: 202 - DNA, 22 bp, synthetic construct
  misc_feature 1..22: note = Synthetic
  source 1..22: mol_type = other DNA
ccttggtttctgtgattttctt

SEQ ID NO: 203 - DNA, 22 bp, synthetic construct
  misc_feature 1..22: note = Synthetic
  source 1..22: mol_type = other DNA
cttttggattgcatctactgta

SEQ ID NO: 204 - DNA, 22 bp, synthetic construct
  misc_feature 1..22: note = Synthetic
  source 1..22: mol_type = other DNA
ttttggattgcatctactgtat

SEQ ID NO: 205 - DNA, 22 bp, synthetic construct
  misc_feature 1..22: note = Synthetic
  source 1..22: mol_type = other DNA
accctccttccatgactcaagc

SEQ ID NO: 206 - DNA, 22 bp, synthetic construct
  misc_feature 1..22: note = Synthetic
  source 1..22: mol_type = other DNA
cttccatgactcaagcttggct

SEQ ID NO: 207 - DNA, 22 bp, synthetic construct
  misc_feature 1..22: note = Synthetic
  source 1..22: mol_type = other DNA
acatttcattcaactgttgcct

SEQ ID NO: 208 - DNA, 22 bp, synthetic construct
  misc_feature 1..22: note = Synthetic
  source 1..22: mol_type = other DNA
tcaactgttgcctccggttctg

SEQ ID NO: 209 - DNA, 22 bp, synthetic construct
  misc_feature 1..22: note = Synthetic
  source 1..22: mol_type = other DNA
tgaattctttcaactagaataa

SEQ ID NO: 210 - DNA, 22 bp, synthetic construct
  misc_feature 1..22: note = Synthetic
  source 1..22: mol_type = other DNA
ccaaaagaaaatcacagaaacc

SEQ ID NO: 211 - DNA, 22 bp, synthetic construct
  misc_feature 1..22: note = Synthetic
  source 1..22: mol_type = other DNA
gccaagcttgagtcatggaagg

SEQ ID NO: 212 - DNA, 22 bp, synthetic construct
  misc_feature 1..22: note = Synthetic
  source 1..22: mol_type = other DNA
agccaagcttgagtcatggaag

SEQ ID NO: 213 - DNA, 22 bp, synthetic construct
  misc_feature 1..22: note = Synthetic
  source 1..22: mol_type = other DNA
cagagccaagcttgagtcatgg

SEQ ID NO: 214 - DNA, 22 bp, synthetic construct
  misc_feature 1..22: note = Synthetic
  source 1..22: mol_type = other DNA
aggccagagccaagcttgagtc

SEQ ID NO: 215 - DNA, 22 bp, synthetic construct
  misc_feature 1..22: note = Synthetic
  source 1..22: mol_type = other DNA
agaagctgagcaggtcttagga

SEQ ID NO: 216 - DNA, 22 bp, synthetic construct
  misc_feature 1..22: note = Synthetic
  source 1..22: mol_type = other DNA
aaggaagaagctgagcaggtct

SEQ ID NO: 217 - DNA, 22 bp, synthetic construct
  misc_feature 1..22: note = Synthetic
  source 1..22: mol_type = other DNA
ggaagctaaggaagaagctgag

SEQ ID NO: 218 - DNA, 22 bp, synthetic construct
  misc_feature 1..22: note = Synthetic
  source 1..22: mol_type = other DNA
ttcaacacaatggctggaagct

SEQ ID NO: 219 - DNA, 22 bp, synthetic construct
  misc_feature 1..22: note = Synthetic
  source 1..22: mol_type = other DNA
gttaaaggattcaacacaatgg

SEQ ID NO: 220 - DNA, 22 bp, synthetic construct
  misc_feature 1..22: note = Synthetic
  source 1..22: mol_type = other DNA
aaatgttaaaggattcaacaca

SEQ ID NO: 221 - DNA, 22 bp, synthetic construct
  misc_feature 1..22: note = Synthetic
  source 1..22: mol_type = other DNA
gcaacagttgaatgaaatgtta

SEQ ID NO: 222 - DNA, 22 bp, synthetic construct
  misc_feature 1..22: note = Synthetic
  source 1..22: mol_type = other DNA
tacaagaacaccttcagaaccg

SEQ ID NO: 223 - DNA, 22 bp, synthetic construct
  misc_feature 1..22: note = Synthetic
  source 1..22: mol_type = other DNA
aagtacaagaacaccttcagaa

SEQ ID NO: 224 - DNA, 22 bp, synthetic construct
  misc_feature 1..22: note = Synthetic
  source 1..22: mol_type = other DNA
agttgaaagaattcagaatcag

SEQ ID NO: 225 - DNA, 22 bp, synthetic construct
  misc_feature 1..22: note = Synthetic
  source 1..22: mol_type = other DNA
tagttgaaagaattcagaatca

SEQ ID NO: 226-299 - skipped (74 entries)

SEQ ID NO: 300 - DNA, 4777 bp, synthetic construct
  misc_feature 1..4777: note = Synthetic
  source 1..4777: mol_type = other DNA
gtttccggccgccgtcgctgtccagggaggctgaggcgagaggtagctgtccgggtggggagcccgcactaccttcttcctcttcctcctcctcctccgggtgaggggagcgaaggttgggggtccccgagcccatggaccaggaggaggcggaggccgccgagagccggggccccgctatgtggccctgagccccgtgtactggttctgcctgtctggagggccatggagaagaggctgggagtcaagccaaatcctgcttcctggattttatcaggatattattggcagacatctgcgaagtggttgagaagcctgtacctgttttatacttgcttttgcttcagcgttctgtggttgtcaacagatgccagtgagagcaggtgccagcaggggaagacacaatttggagttggcctgagatctgggggagaaaatcacctctggcttcttgaaggaaccccctctctccagtcatgttgggctgcctgctgccaggactctgcctgccatgtcttttggtggctagaagggatgtgcattcaggcagactgcagcaggccccagagctgccgggcttttaggacacactcctccaattccatgctggtgtttttaaaaaaattccaaactgcagatgatttgggctttctacctgaagatgatgtaccacatcttctggggctaggttggaactgggcatcttggaggcagagcccacccagagctgcactcagacctgctgtatcttccagtgaccagcagagcttaatcaggaagcttcagaagagaggtagtcccagtgacgtagttacacctatagtgacacagcattctaaagtgaatgactccaacgaattaggtggtctgactaccagtggctctgcagaggtccacaaggcgattacaatttccagtcccctaaccacagacctgactgcagagctgtctggtgggccaaagaatgtatcagtgcaacctgaaatatcagagggtcttgctactacgcccagcactcaacaagtaaaaagttctgagaaaacccagattgctgtcccccagccagtggctccctcctacagttatgctacccctaccccccaggcctctttccagagcacctcagcaccatacccagttataaaggaactggtggtatctgctggagagagtgtccagataaccctgcctaagaatgaagttcaattaaatgcatatgttctccaagaaccacctaaaggagaaacctacacctacgactggcagctgattactcatcctagagactacagtggagaaatggaagggaaacattcccagatcctcaaactatcgaagctcactccaggcctgtatgaattcaaagtgattgtagagggtcaaaatgcccatggggaaggctatgtgaacgtgacagtcaagccagagccccgtaagaatcggccccccattgctattgtgtcacctcagttccaggagatctctttgccaaccacttctacagtcattgatggcagtcaaagcactgatgatgataaaatcgttcagtaccattgggaagaacttaaggggcctctaagagaagagaagatttctgaagatacagccatattaaaactaagtaaactcgtccctgggaactacactttcagcttgactgtagtagactctgatggagctaccaactctactactgcaaacctgacagtgaacaaagctgtggattacccccctgtggccaacgcaggccccaaccaagtgatcaccctgccccaaaactccatcaccctctttgggaaccagagcactgatgatcatggcatcaccagctatgagtggtcactcagcccaagcagcaaagggaaagtggtggagatgcagggtgttagaacaccaaccttacagctctctgcgatgcaagaaggagactacacttaccagctcacagtgactgacacaataggacagcaggccactgctcaagtgactgttattgtgcaacctgaaaacaataagcctcctcaggcagatgcaggcccagataaagagctgacccttcctgtggatagcacaaccctggatggcagcaagagctcagatgatcagaaaattatctcatatctctgggaaaaaacacagggacctgatggggtgcagctcgagaatgctaacagcagtgttgctactgtgactgggctgcaagtggggacctatgtgttcaccttgactgtcaaagatgagaggaacctgcaaagccagagctctgtgaatgtcattgtcaaagaagaaataaacaaaccacctatagccaagataactgggaatgtggtgattaccctacccacgagcacagcagagctggatggctctaagtcctcagatgacaagggaatagtcagctacctctggactcgagatgaggggagcccagcagcaggggaggtgttaaatcactctgaccatcaccctatcctttttctttcaaacctggttgagggaacctacacttttcacctgaaagtgaccgatgcaaagggtgagagtgacacagaccggaccactgtggaggtgaaacctgatcccaggaaaaacaacctggtggagatcatcttggatatcaacgtcagtcagctaactgagaggctgaaggggatgttcatccgccagattggggtcctcctgggggtgctggattccgacatcattgtgcaaaagattcagccgtacacggagcagagcaccaaaatggtattttttgttcaaaacgagcctccccaccagatcttcaaaggccatgaggtggcagcgatgctcaagagtgagctgcggaagcaaaaggcagactttttgatattcagagccttggaagtcaacactgtcacatgtcagctgaactgttccgaccatggccactgtgactcgttcaccaaacgctgtatctgtgaccctttttggatggagaatttcatcaaggtgcagctgagggatggagacagcaactgtgagtggagcgtgttatatgttatcattgctacctttgtcattgttgttgccttgggaatcctgtcttggactgtgatctgttgttgtaagaggcaaaaaggaaaacccaagaggaaaagcaagtacaagatcctggatgccacggatcaggaaagcctggagctgaagccaacctcccgagcaggcatcaaacagaaaggccttttgctaagtagcagcctgatgcactccgagtcagagctggacagcgatgatgccatctttacatggccagaccgagagaagggcaaactcctgcatggtcagaatggctctgtacccaacgggcagacccctctgaaggccaggagcccgcgggaggagatcctgtagccacctggtctgtctcctcagggcagggcccagcacactgcccggccagtcctcctacctcccgagtctgcgggcagctgctgtcccagcatctgctggtcatttcgccctgacagtcccaaccagaacccctgggacttgaatccagagacgtcctccaggaacccctcaacgaagctgtgaatgaagaggtttcctctttaaacctgtctggtgggcccccagatatcctcacctcagggcctcctttttttgcaaactcctcccctcccccgagggcagacccagccagctgctaagctctgcagctccccagtggacagtgtcattgtgcccagagtgctgcaaggtgaggcctgctgtgctgcccgcacacctgagtgcaaaaccaagcactgtgggcatggtgtttccctctctggggtagagtacgccctctcgctgggcaaagaggaagtggcacccctcccctcaccacagatgctgagatggtagcatagaaatgatggccgggcgcggtggctcacgcctgtaatcccagcactttgggaggccgaggcgggcggatcatgaggtcaggagatcaagaccaccctggctaacacggtgaaaccccatctctactaaaaataaaaaaaaaaattagccgggtttggtggcgtatgcctgtaatcccagctactcgggaggctgaggcaggagaattgcttaaacctgggaggtggaggctgcagtgagccaagatcgtgccactgcactccagcctgagtgacagagcaagactccgtcaaaaaaaaaaaaaaaaaaaaagaaatgatatctggcccccccttaacactggagccccactcccttctcccatccggcccgagattagggaggattgactgtgtcagggatggcgggtggcctctctcgctgccagggcccttgtcagagcagccaggctggacagacggcctccctcctctccatctgaccggcacctgctgcttcggggcttaggccaccgctccctgtccccagaggagatagccccagatggactggaatgttgtggcatgagagcgcatgtgtgcgatggccccgctgtggtcccctctctgtccctccatctgtatgtgttctgtgtcccttgcatgtgtgcgtgttagagtgagcgcgtatgcatcaactcattgggctcttggctgctcacaaggcaaatttgacttggaaagactttcatctccttggaaccaagacttcctgagtccccctcaccctggccctgttccaccatggttatctgggtattggggaatggaaactttgggggagtgactttttaaagagacacttataatttctactactgcactactgtccattgtgggatgattaaacatggtatttaactgtg

SEQ ID NO: 301 - protein, 1049 aa, synthetic construct
  REGION 1..1049: note = Synthetic
MEKRLGVKPNPASWILSGYYWQTSAKWLRSLYLFYTCFCFSVLWLSTDASESRCQQGKTQFGVGLRSGGENHLWLLEGTPSLQSCWAACCQDSACHVFWWLEGMCIQADCSRPQSCRAFRTHSSNSMLVFLKKFQTADDLGFLPEDDVPHLLGLGWNWASWRQSPPRAALRPAVSSSDQQSLIRKLQKRGSPSDVVTPIVTQHSKVNDSNELGGLTTSGSAEVHKAITISSPLTTDLTAELSGGPKNVSVQPEISEGLATTPSTQQVKSSEKTQIAVPQPVAPSYSYATPTPQASFQSTSAPYPVIKELVVSAGESVQITLPKNEVQLNAYVLQEPPKGETYTYDWQLITHPRDYSGEMEGKHSQILKLSKLTPGLYEFKVIVEGQNAHGEGYVNVTVKPEPRKNRPPIAIVSPQFQEISLPTTSTVIDGSQSTDDDKIVQYHWEELKGPLREEKISEDTAILKLSKLVPGNYTFSLTVVDSDGATNSTTANLTVNKAVDYPPVANAGPNQVITLPQNSITLFGNQSTDDHGITSYEWSLSPSSKGKVVEMQGVRTPTLQLSAMQEGDYTYQLTVTDTIGQQATAQVTVIVQPENNKPPQADAGPDKELTLPVDSTTLDGSKSSDDQKIISYLWEKTQGPDGVQLENANSSVATVTGLQVGTYVFTLTVKDERNLQSQSSVNVIVKEEINKPPIAKITGNVVITLPTSTAELDGSKSSDDKGIVSYLWTRDEGSPAAGEVLNHSDHHPILFLSNLVEGTYTFHLKVTDAKGESDTDRTTVEVKPDPRKNNLVEIILDINVSQLTERLKGMFIRQIGVLLGVLDSDIIVQKIQPYTEQSTKMVFFVQNEPPHQIFKGHEVAAMLKSELRKQKADFLIFRALEVNTVTCQLNCSDHGHCDSFTKRCICDPFWMENFIKVQLRDGDSNCEWSVLYVIIATFVIVVALGILSWTVICCCKRQKGKPKRKSKYKILDATDQESLELKPTSRAGIKQKGLLLSSSLMHSESELDSDDAIFTWPDREKGKLLHGQNGSVPNGQTPLKARSPREEIL

SEQ ID NO: 302 - DNA, 436 bp, synthetic construct
  misc_feature 1..436: note = Synthetic
  source 1..436: mol_type = other DNA
tgcccatgtaaggaggcaaggcctggggacacccgagatgcctggttataattaacccagacatgtggctgcccccccccccccaacacctgctgcctctaaaaataaccctgcatgccatgttcccggcgaagggccagctgtcccccgccagctagactcagcacttagtttaggaaccagtgagcaagtcagcccttggggcagcccatacaaggccatggggctgggcaagctgcacgcctgggtccggggtgggcacggtgcccgggcaacgagctgaaagctcatctgctctcaggggcccctccctggggacagcccctcctggctagtcacaccctgtaggctcctctatataacccaggggcacaggggctgccctcattctaccaccacctccacagcacagacagacactcaggagccagccagc

SEQ ID NO: 303 - DNA, 249 bp, synthetic construct
  misc_feature 1..249: note = Synthetic
  source 1..249: mol_type = other DNA
gagggcctatttcccatgattccttcatatttgcatatacgatacaaggctgttagagagataattggaattaatttgactgtaaacacaaagatattagtacaaaatacgtgacgtagaaagtaataatttcttgggtagtttgcagttttaaaattatgttttaaaatggactatcatatgcttaccgtaacttgaaagtatttcgatttcttggctttatatatcttgtggaaaggacgaaacacc

SEQ ID NO: 304 - DNA, 108 bp, synthetic construct
  misc_feature 1..108: note = Synthetic
  source 1..108: mol_type = other DNA
gctcggcgcgcccatatttgcatgtcgctatgtgttctgggaaatcaccataaacgtgaaatgtctttggatttgggaatcttataagttctgtatgagaccacggta

SEQ ID NO: 305 - DNA, 243 bp, synthetic construct
  misc_feature 1..243: note = Synthetic
  source 1..243: mol_type = other DNA
ctgcagtatttagcatgccccacccatctgcaaggcattctggatagtgtcaaaacagccggaaatcaagtccgtttatctcaaactttagcattttgggaataaatgatatttgctatgctggttaaattagattttagttaaatttcctgctgaagctctagtacgataagcaacttgacctaagtgtaaagttgagacttccttcaggtttatatagcttgtgcgccgcttgggtacctc

SEQ ID NO: 306 - protein, 1052 aa, synthetic construct
  REGION 1..1052: note = Synthetic
KRNYILGLDIGITSVGYGIIDYETRDVIDAGVRLFKEANVENNEGRRSKRGARRLKRRRRHRIQRVKKLLFDYNLLTDHSELSGINPYEARVKGLSQKLSEEEFSAALLHLAKRRGVHNVNEVEEDTGNELSTKEQISRNSKALEEKYVAELQLERLKKDGEVRGSINRFKTSDYVKEAKQLLKVQKAYHQLDQSFIDTYIDLLETRRTYYEGPGEGSPFGWKDIKEWYEMLMGHCTYFPEELRSVKYAYNADLYNALNDLNNLVITRDENEKLEYYEKFQIIENVFKQKKKPTLKQIAKEILVNEEDIKGYRVTSTGKPEFTNLKVYHDIKDITARKEIIENAELLDQIAKILTIYQSSEDIQEELTNLNSELTQEEIEQISNLKGYTGTHNLSLKAINLILDELWHTNDNQIAIFNRLKLVPKKVDLSQQKEIPTTLVDDFILSPVVKRSFIQSIKVINAIIKKYGLPNDIIIELAREKNSKDAQKMINEMQKRNRQTNERIEEIIRTTGKENAKYLIEKIKLHDMQEGKCLYSLEAIPLEDLLNNPFNYEVDHIIPRSVSFDNSFNNKVLVKQEENSKKGNRTPFQYLSSSDSKISYETFKKHILNLAKGKGRISKTKKEYLLEERDINRFSVQKDFINRNLVDTRYATRGLMNLLRSYFRVNNLDVKVKSINGGFTSFLRRKWKFKKERNKGYKHHAEDALIIANADFIFKEWKKLDKAKKVMENQMFEEKQAESMPEIETEQEYKEIFITPHQIKHIKDFKDYKYSHRVDKKPNRELINDTLYSTRKDDKGNTLIVNNLNGLYDKDNDKLKKLINKSPEKLLMYHHDPQTYQKLKLIMEQYGDEKNPLYKYYEETGNYLTKYSKKDNGPVIKKIKYYGNKLNAHLDITDDYPNSRNKVVKLSLKPYRFDVYLDNGVYKFVTVKNLDVIKKENYYEVNSKCYEEAKKLKKISNQAEFIASFYNNDLIKINGELYRVIGVNNDLLNRIEVNMIDITYREYLENMNDKRPPRIIKTIASKTQSIKKYSTDILGNLYEVKSKKHPQIIKKG

SEQ ID NO: 307 - protein, 1052 aa, synthetic construct
  REGION 1..1052: note = Synthetic
KRNYILGLDIGITSVGYGIIDYETRDVIDAGVRLFKEANVENNEGRRSKRGARRLKRRRRHRIQRVKKLLFDYNLLTDHSELSGINPYEARVKGLSQKLSEEEFSAALLHLAKRRGVHNVNEVEEDTGNELSTKEQISRNSKALEEKYVAELQLERLKKDGEVRGSINRFKTSDYVKEAKQLLKVQKAYHQLDQSFIDTYIDLLETRRTYYEGPGEGSPFGWKDIKEWYEMLMGHCTYFPEELRSVKYAYNADLYNALNDLNNLVITRDENEKLEYYEKFQIIENVFKQKKKPTLKQIAKEILVNEEDIKGYRVTSTGKPEFTNLKVYHDIKDITARKEIIENAELLDQIAKILTIYQSSEDIQEELTNLNSELTQEEIEQISNLKGYTGTHNLSLKAINLILDELWHTNDNQIAIFNRLKLVPKKVDLSQQKEIPTTLVDDFILSPVVKRSFIQSIKVINAIIKKYGLPNDIIIELAREKNSKDAQKMINEMQKRNRQTNERIEEIIRTTGKENAKYLIEKIKLHDMQEGKCLYSLEAIPLEDLLNNPFNYEVDHIIPRSVSFDNSFNNKVLVKQEENSKKGNRTPFQYLSSSDSKISYETFKKHILNLAKGKGRISKTKKEYLLEERDINRFSVQKDFINRNLVDTRYATRGLMNLLRSYFRVNNLDVKVKSINGGFTSFLRRKWKFKKERNKGYKHHAEDALIIANADFIFKEWKKLDKAKKVMENQMFEEKQAESMPEIETEQEYKEIFITPHQIKHIKDFKDYKYSHRVDKKPNRKLINDTLYSTRKDDKGNTLIVNNLNGLYDKDNDKLKKLINKSPEKLLMYHHDPQTYQKLKLIMEQYGDEKNPLYKYYEETGNYLTKYSKKDNGPVIKKIKYYGNKLNAHLDITDDYPNSRNKVVKLSLKPYRFDVYLDNGVYKFVTVKNLDVIKKENYYEVNSKCYEEAKKLKKISNQAEFIASFYKNDLIKINGELYRVIGVNNDLLNRIEVNMIDITYREYLENMNDKRPPHIIKTIASKTQSIKKYSTDILGNLYEVKSKKHPQIIKKG

SEQ ID NO: 308 - protein, 1053 aa, synthetic construct
  REGION 1..1053: note = Synthetic
NQKFILGLDIGITSVGYGLIDYETKNIIDAGVRLFPEANVENNEGRRSKRGSRRLKRRRIHRLERVKKLLEDYNLLDQSQIPQSTNPYAIRVKGLSEALSKDELVIALLHIAKRRGIHKIDVIDSNDDVGNELSTKEQLNKNSKLLKDKFVCQIQLERMNEGQVRGEKNRFKTADIIKEIIQLLNVQKNFHQLDENFINKYIELVEMRREYFEGPGKGSPYGWEGDPKAWYETLMGHCTYFPDELRSVKYAYSADLFNALNDLNNLVIQRDGLSKLEYHEKYHIIENVFKQKKKPTLKQIANEINVNPEDIKGYRITKSGKPQFTEFKLYHDLKSVLFDQSILENEDVLDQIAEILTIYQDKDSIKSKLTELDILLNEEDKENIAQLTGYTGTHRLSLKCIRLVLEEQWYSSRNQMEIFTHLNIKPKKINLTAANKIPKAMIDEFILSPVVKRTFGQAINLINKIIEKYGVPEDIIIELARENNSKDKQKFINEMQKKNENTRKRINEIIGKYGNQNAKRLVEKIRLHDEQEGKCLYSLESIPLEDLLNNPNHYEVDHIIPRSVSFDNSYHNKVLVKQSENSKKSNLTPYQYFNSGKSKLSYNQFKQHILNLSKSQDRISKKKKEYLLEERDINKFEVQKEFINRNLVDTRYATRELTNYLKAYFSANNMNVKVKTINGSFTDYLRKVWKFKKERNHGYKHHAEDALIIANADFLFKENKKLKAVNSVLEKPEIETKQLDIQVDSEDNYSEMFIIPKQVQDIKDFRNFKYSHRVDKKPNRQLINDTLYSTRKKDNSTYIVQTIKDIYAKDNTTLKKQFDKSPEKFLMYQHDPRTFEKLEVIMKQYANEKNPLAKYHEETGEYLTKYSKKNNGPIVKSLKYIGNKLGSHLDVTHQFKSSTKKLVKLSIKPYRFDVYLTDKGYKFITISYLDVLKKDNYYYIPEQKYDKLKLGKAIDKNAKFIASFYKNDLIKLDGEIYKIIGVNSDTRNMIELDLPDIRYKEYCELNNIKGEPRIKKTIGKKVNSIEKLTTDVLGNVFTNTQYTKPQLLFKRGN

SEQ ID NO: 309 - protein, 1057 aa, synthetic construct
  REGION 1..1057: note = Synthetic
MNQKFILGLDIGITSVGYGLIDYETKNIIDAGVRLFPEANVENNEGRRSKRGSRRLKRRRIHRLDRVKHLLAEYDLLDLTNIPKSTNPYQTRVKGLNEKLSKDELVIALLHIAKRRGIHNVDVAADKEETASDSLSTKDQINKNAKFLESRYVCELQKERLENEGHVRGVENRFLTKDIVREAKKIIDTQMQYYPEIDETFKEKYISLVETRREYFEGPGKGSPFGWEGNIKKWFEQMMGHCTYFPEELRSVKYSYSAELFNALNDLNNLVITRDEDAKLNYGEKFQIIENVFKQKKTPNLKQIAIEIGVHETEIKGYRVNKSGTPEFTEFKLYHDLKSIVFDKSILENEAILDQIAEILTIYQDEQSIKEELNKLPEILNEQDKAEIAKLIGYNGTHRLSLKCIHLINEELWQTSRNQMEIFNYLNIKPNKVDLSEQNKIPKDMVNDFILSPVVKRTFIQSINVINKVIEKYGIPEDIIIELARENNSDDRKKFINNLQKKNEATRKRINEIIGQTGNQNAKRIVEKIRLHDQQEGKCLYSLKDIPLEDLLRNPNNYDIDHIIPRSVSFDDSMHNKVLVRREQNAKKNNQTPYQYLTSGYADIKYSVFKQHVLNLAENKDRMTKKKREYLLEERDINKFEVQKEFINRNLVDTRYATRELTNYLKAYFSANNMNVKVKTINGSFTDYLRKVWKFKKERNHGYKHHAEDALIIANADFLFKENKKLKAVNSVLEKPEIETKQLDIQVDSEDNYSEMFIIPKQVQDIKDFRNFKYSHRVDKKPNRQLINDTLYSTRKKDNSTYIVQTIKDIYAKDNTTLKKQFDKSPEKFLMYQHDPRTFEKLEVIMKQYANEKNPLAKYHEETGEYLTKYSKKNNGPIVKSLKYIGNKLGSHLDVTHQFKSSTKKLVKLSIKPYRFDVYLTDKGYKFITISYLDVLKKDNYYYIPEQKYDKLKLGKAIDKNAKFIASFYKNDLIKLDGEIYKIIGVNSDTRNMIELDLPDIRYKEYCELNNIKGEPRIKKTIGKKVNSIEKLTTDVLGNVFTNTQYTKPQLLFKRGN

SEQ ID NO: 310 - protein, 1053 aa, synthetic construct
  REGION 1..1053: note = Synthetic
MNQKFILGLDIGITSVGYGLIDYETKNIIDAGVRLFPEANVENNEGRRSKRGSRRLKRRRIHRLERVKSLLSEYKIISGLAPTNNQPYNIRVKGLTEQLTKDELAVALLHIAKRRGIHKIDVIDSNDDVGNELSTKEQLNKNSKLLKDKFVCQIQLERMNEGQVRGEKNRFKTADIIKEIIQLLNVQKNFHQLDENFINKYIELVEMRREYFEGPGQGSPFGWNGDLKKWYEMLMGHCTYFPQELRSVKYAYSADLFNALNDLNNLIIQRDNSEKLEYHEKYHIIENVFKQKKKPTLKQIAKEIGVNPEDIKGYRITKSGTPEFTEFKLYHDLKSVLFDQSILENEDVLDQIAEILTIYQDKDSIKSKLTELDILLNEEDKENIAQLTGYNGTHRLSLKCIRLVLEEQWYSSRNQMEIFTHLNIKPKKINLTAANKIPKAMIDEFILSPVVKRTFIQSINVINKVIEKYGIPEDIIIELARENNSDDRKKFINNLQKKNEATRKRINEIIGQTGNQNAKRIVEKIRLHDQQEGKCLYSLESIALMDLLNNPQNYEVDHIIPRSVAFDNSIHNKVLVKQIENSKKGNRTPYQYLNSSDAKLSYNQFKQHILNLSKSKDRISKKKKDYLLEERDINKFEVQKEFINRNLVDTRYATRELTSYLKAYFSANNMDVKVKTINGSFTNHLRKVWRFDKYRNHGYKHHAEDALIIANADFLFKENKKLKAVNSVLEKPEIETKQLDIQVDSEDNYSEMFIIPKQVQDIKDFRNFKYSHRVDKKPNRQLINDTLYSTRKKDNSTYIVQTIKDIYAKDNTTLKKQFDKSPEKFLMYQHDPRTFEKLEVIMKQYANEKNPLAKYHEETGEYLTKYSKKNNGPIVKSLKYIGNKLGSHLDVTHQFKSSTKKLVKLSIKPYRFDVYLTDKGYKFITISYLDVLKKDNYYYIPEQKYDKLKLGKAIDKNAKFIASFYKNDLIKLDGEIYKIIGVNSDTRNMIELDLPDIRYKEYCELNNIKGEPRIKKTIGKKVNSIEKLTTDVLGNVFTNTQYTKPQLLFKRGN

SEQ ID NO: 311 - protein, 1057 aa, synthetic construct
  REGION 1..1057: note = Synthetic
MNQKFILGLDIGITSVGYGLIDYETKNIIDAGVRLFPEANVENNEGRRSKRGSRRLKRRRIHRLERVKLLLTEYDLINKEQIPTSNNPYQIRVKGLSEILSKDELAIALLHLAKRRGIHNVDVAADKEETASDSLSTKDQINKNAKFLESRYVCELQKERLENEGHVRGVENRFLTKDIVREAKKIIDTQMQYYPEIDETFKEKYISLVETRREYFEGPGQGSPFGWNGDLKKWYEMLMGHCTYFPQELRSVKYAYSADLFNALNDLNNLIIQRDNSEKLEYHEKYHIIENVFKQKKKPTLKQIAKEIGVNPEDIKGYRITKSGTPEFTSFKLFHDLKKVVKDHAILDDIDLLNQIAEILTIYQDKDSIVAELGQLEYLMSEADKQSISELTGYTGTHSLSLKCMNMIIDELWHSSMNQMEVFTYLNMRPKKYELKGYQRIPTDMIDDAILSPVVKRTFIQSINVINKVIEKYGIPEDIIIELARENNSDDRKKFINNLQKKNEATRKRINEIIGQTGNQNAKRIVEKIRLHDQQEGKCLYSLESIPLEDLLNNPNHYEVDHIIPRSVSFDNSYHNKVLVKQSENSKKSNLTPYQYFNSGKSKLSYNQFKQHILNLSKSQDRISKKKKEYLLEERDINKFEVQKEFINRNLVDTRYATRELTNYLKAYFSANNMNVKVKTINGSFTDYLRKVWKFKKERNHGYKHHAEDALIIANADFLFKENKKLKAVNSVLEKPEIETKQLDIQVDSEDNYSEMFIIPKQVQDIKDFRNFKYSHRVDKKPNRQLINDTLYSTRKKDNSTYIVQTIKDIYAKDNTTLKKQFDKSPEKFLMYQHDPRTFEKLEVIMKQYANEKNPLAKYHEETGEYLTKYSKKNNGPIVKSLKYIGNKLGSHLDVTHQFKSSTKKLVKLSIKPYRFDVYLTDKGYKFITISYLDVLKKDNYYYIPEQKYDKLKLGKAIDKNAKFIASFYKNDLIKLDGEIYKIIGVNSDTRNMIELDLPDIRYKEYCELNNIKGEPRIKKTIGKKVNSIEKLTTDVLGNVFTNTQYTKPQLLFKRGN

SEQ ID NO: 312 - protein, 1057 aa, synthetic construct
  REGION 1..1057: note = Synthetic
MNQKFILGLDIGITSVGYGLIDYETKNIIDAGVRLFPEANVENNEGRRSKRGSRRLKRRRIHRLERVKLLLTEYDLINKEQIPTSNNPYQIRVKGLSEILSKDELAIALLHLAKRRGIHNVDVAADKEETASDSLSTKDQINKNAKFLESRYVCELQKERLENEGHVRGVENRFLTKDIVREAKKIIDTQMQYYPEIDETFKEKYISLVETRREYFEGPGQGSPFGWNGDLKKWYEMLMGHCTYFPQELRSVKYAYSADLFNALNDLNNLIIQRDNSEKLEYHEKYHIIENVFKQKKKPTLKQIAKEIGVNPEDIKGYRITKSGTPEFTSFKLFHDLKKVVKDHAILDDIDLLNQIAEILTIYQDKDSIVAELGQLEYLMSEADKQSISELTGYTGTHSLSLKCMNMIIDELWHSSMNQMEVFTYLNMRPKKYELKGYQRIPTDMIDDAILSPVVKRTFIQSINVINKVIEKYGIPEDIIIELARENNSDDRKKFINNLQKKNEATRKRINEIIGQTGNQNAKRIVEKIRLHDQQEGKCLYSLESIPLEDLLNNPNHYEVDHIIPRSVSFDNSYHNKVLVKQSENSKKSNLTPYQYFNSGKSKLSYNQFKQHILNLSKSQDRISKKKKEYLLEERDINKFEVQKEFINRNLVDTRYATRELTNYLKAYFSANNMNVKVKTINGSFTDYLRKVWKFKKERNHGYKHHAEDALIIANADFLFKENKKLKAVNSVLEKPEIETKQLDIQVDSEDNYSEMFIIPKQVQDIKDFRNFKYSHRVDKKPNRQLINDTLYSTRKKDNSTYIVQTIKDIYAKDNTTLKKQFDKSPEKFLMYQHDPRTFEKLEVIMKQYANEKNPLAKYHEETGEYLTKYSKKNNGPIVKSLKYIGNKLGSHLDVTHQFKSSTKKLVKLSIKNYRFDVYLTEKGYKFVTIAYLNVFKKDNYYYIPKDKYQELKEKKKIKDTDQFIASFYKNDLIKLNGDLYKIIGVNSDDRNIIELDYYDIKYKDYCEINNIKGEPRIKKTIGKKTESIEKFTTDVLGNLYLHSTEKAPQLIFKRGL

SEQ ID NO: 313 - protein, 1057 aa, synthetic construct
  REGION 1..1057: note = Synthetic
MNQKFILGLDIGITSVGYGLIDYETKNIIDAGVRLFPEANVENNEGRRSKRGSRRLKRRRIHRLERVKLLLTEYDLINKEQIPTSNNPYQIRVKGLSEILSKDELAIALLHLAKRRGIHNVDVAADKEETASDSLSTKDQINKNAKFLESRYVCELQKERLENEGHVRGVENRFLTKDIVREAKKIIDTQMQYYPEIDETFKEKYISLVETRREYFEGPGQGSPFGWNGDLKKWYEMLMGHCTYFPQELRSVKYAYSADLFNALNDLNNLIIQRDNSEKLEYHEKYHIIENVFKQKKKPTLKQIAKEIGVNPEDIKGYRITKSGTPEFTSFKLFHDLKKVVKDHAILDDIDLLNQIAEILTIYQDKDSIVAELGQLEYLMSEADKQSISELTGYTGTHSLSLKCMNMIIDELWHSSMNQMEVFTYLNMRPKKYELKGYQRIPTDMIDDAILSPVVKRTFIQSINVINKVIEKYGIPEDIIIELARENNSDDRKKFINNLQKKNEATRKRINEIIGQTGNQNAKRIVEKIRLHDQQEGKCLYSLESIPLEDLLNNPNHYEVDHIIPRSVSFDNSYHNKVLVKQSENSKKSNLTPYQYFNSGKSKLSYNQFKQHILNLSKSQDRISKKKKEYLLEERDINKFEVQKEFINRNLVDTRYATRELTNYLKAYFSANNMNVKVKTINGSFTDYLRKVWKFKKERNHGYKHHAEDALIIANADFLFKENKKLKAVNSVLEKPEIETKQLDIQVDSEDNYSEMFIIPKQVQDIKDFRNFKFSHRVDKKPNRQLINDTLYSTRMKDEHDYIVQTITDIYGKDNTNLKKQFNKNPEKFLMYQNDPKTFEKLSIIMKQYSDEKNPLAKYYEETGEYLTKYSKKNNGPIVKKIKLLGNKVGNHLDVTNKYENSTKKLVKLSIKNYRFDVYLTEKGYKFVTIAYLNVFKKDNYYYIPKDKYQELKEKKKIKDTDQFIASFYKNDLIKLNGDLYKIIGVNSDDRNIIELDYYDIKYKDYCEINNIKGEPRIKKTIGKKTESIEKFTTDVLGNLYLHSTEKAPQLIFKRGL

SEQ ID NO: 314 - protein, 1057 aa, synthetic construct
  REGION 1..1057: note = Synthetic
MNQKFILGLDIGITSVGYGLIDYETKNIIDAGVRLFPEANVENNEGRRSKRGSRRLKRRRIHRLERVKLLLTEYDLINKEQIPTSNNPYQIRVKGLSEILSKDELAIALLHLAKRRGIHNVDVAADKEETASDSLSTKDQINKNAKFLESRYVCELQKERLENEGHVRGVENRFLTKDIVREAKKIIDTQMQYYPEIDETFKEKYISLVETRREYFEGPGQGSPFGWNGDLKKWYEMLMGHCTYFPQELRSVKYAYSADLFNALNDLNNLIIQRDNSEKLEYHEKYHIIENVFKQKKKPTLKQIAKEIGVNPEDIKGYRITKSGTPEFTSFKLFHDLKKVVKDHAILDDIDLLNQIAEILTIYQDKDSIVAELGQLEYLMSEADKQSISELTGYTGTHSLSLKCMNMIIDELWHSSMNQMEVFTYLNMRPKKYELKGYQRIPTDMIDDAILSPVVKRTFIQSINVINKVIEKYGIPEDIIIELARENNSDDRKKFINNLQKKNEATRKRINEIIGQTGNQNAKRIVEKIRLHDQQEGKCLYSLESIPLEDLLNNPNHYEVDHIIPRSVSFDNSYHNKVLVKQSENSKKSNLTPYQYFNSGKSKLSYNQFKQHILNLSKSQDRISKKKKEYLLEERDINKFEVQKEFINRNLVDTRYATRELTSYLKAYFSANNMDVKVKTINGSFTNHLRKVWRFDKYRNHGYKHHAEDALIIANADFLFKENKKLQNTNKILEKPTIENNTKKVTVEKEEDYNNVFETPKLVEDIKQYRDYKFSHRVDKKPNRQLINDTLYSTRMKDEHDYIVQTITDIYGKDNTNLKKQFNKNPEKFLMYQNDPKTFEKLSIIMKQYSDEKNPLAKYYEETGEYLTKYSKKNNGPIVKKIKLLGNKVGNHLDVTNKYENSTKKLVKLSIKNYRFDVYLTEKGYKFVTIAYLNVFKKDNYYYIPKDKYQELKEKKKIKDTDQFIASFYKNDLIKLNGDLYKIIGVNSDDRNIIELDYYDIKYKDYCEINNIKGEPRIKKTIGKKTESIEKFTTDVLGNLYLHSTEKAPQLIFKRGL

SEQ ID NO: 315 - protein, 1054 aa, synthetic construct
  REGION 1..1054: note = Synthetic
MNQKFILGLDIGITSVGYGLIDYETKNIIDAGVRLFPEANVENNEGRRSKRGSRRLKRRRIHRLERVKKLLEDYNLLDQSQIPQSTNPYAIRVKGLSEALSKDELVIALLHIAKRRGIHNINVSSEDEDASNELSTKEQINRNNKLLKDKYVCEVQLQRLKEGQIRGEKNRFKTTDILKEIDQLLKVQKDYHNLDIDFINQYKEIVETRREYFEGPGKGSPYGWEGDPKAWYETLMGHCTYFPDELRSVKYAYSADLFNALNDLNNLVIQRDGLSKLEYHEKYHIIENVFKQKKKPTLKQIANEINVNPEDIKGYRITKSGKPEFTSFKLFHDLKKVVKDHAILDDIDLLNQIAEILTIYQDKDSIVAELGQLEYLMSEADKQSISELTGYTGTHSLSLKCMNMIIDELWHSSMNQMEVFTYLNMRPKKYELKGYQRIPTDMIDDAILSPVVKRTFIQSINVINKVIEKYGIPEDIIIELARENNSDDRKKFINNLQKKNEATRKRINEIIGQTGNQNAKRIVEKIRLHDQQEGKCLYSLESIPLEDLLNNPNHYEVDHIIPRSVSFDNSYHNKVLVKQSENSKKSNLTPYQYFNSGKSKLSYNQFKQHILNLSKSQDRISKKKKEYLLEERDINKFEVQKEFINRNLVDTRYATRELTNYLKAYFSANNMNVKVKTINGSFTDYLRKVWKFKKERNHGYKHHAEDALIIANADFLFKENKKLKAVNSVLEKPEIETKQLDIQVDSEDNYSEMFIIPKQVQDIKDFRNFKYSHRVDKKPNRQLINDTLYSTRKKDNSTYIVQTIKDIYAKDNTTLKKQFDKSPEKFLMYQHDPRTFEKLEVIMKQYANEKNPLAKYHEETGEYLTKYSKKNNGPIVKSLKYIGNKLGSHLDVTHQFKSSTKKLVKLSIKPYRFDVYLTDKGYKFITISYLDVLKKDNYYYIPEQKYDKLKLGKAIDKNAKFIASFYKNDLIKLDGEIYKIIGVNSDTRNMIELDLPDIRYKEYCELNNIKGEPRIKKTIGKKVNSIEKLTTDVLGNVFTNTQYTKPQLLFKRGN

SEQ ID NO: 316-999 - skipped (684 entries)

SEQ ID NO: 1000 - DNA, 22 bp, synthetic construct
  misc_feature 1..22: note = Synthetic
  source 1..22: mol_type = other DNA
tgtttgcagacctcctgccacc

SEQ ID NO: 1001 - DNA, 22 bp, synthetic construct
  misc_feature 1..22: note = Synthetic
  source 1..22: mol_type = other DNA
ctgccaccgcagattcaggctt

SEQ ID NO: 1002 - DNA, 22 bp, synthetic construct
  misc_feature 1..22: note = Synthetic
  source 1..22: mol_type = other DNA
aggattgctgaattatttcttc

SEQ ID NO: 1003 - DNA, 22 bp, synthetic construct
  misc_feature 1..22: note = Synthetic
  source 1..22: mol_type = other DNA
aattatttcttccccagttgca

SEQ ID NO: 1004 - DNA, 22 bp, synthetic construct
  misc_feature 1..22: note = Synthetic
  source 1..22: mol_type = other DNA
cagttgcattcaatgttctgac

SEQ ID NO: 1005 - DNA, 22 bp, synthetic construct
  misc_feature 1..22: note = Synthetic
  source 1..22: mol_type = other DNA
ttctgacaacagtttgccgctg

SEQ ID NO: 1006 - DNA, 22 bp, synthetic construct
  misc_feature 1..22: note = Synthetic
  source 1..22: mol_type = other DNA
caatgccatcctggagttcctg

SEQ ID NO: 1007 - DNA, 22 bp, synthetic construct
  misc_feature 1..22: note = Synthetic
  source 1..22: mol_type = other DNA
taagataccaaaaaggcaaaac

SEQ ID NO: 1008 - DNA, 22 bp, synthetic construct
  misc_feature 1..22: note = Synthetic
  source 1..22: mol_type = other DNA
aaaaaagaggtagggcgacaga

SEQ ID NO: 1009 - DNA, 22 bp, synthetic construct
  misc_feature 1..22: note = Synthetic
  source 1..22: mol_type = other DNA
gacagaaaaaagaggtagggcg

SEQ ID NO: 1010 - DNA, 22 bp, synthetic construct
  misc_feature 1..22: note = Synthetic
  source 1..22: mol_type = other DNA
aaacagctgtcagacagaaaaa

SEQ ID NO: 1011 - DNA, 22 bp, synthetic construct
  misc_feature 1..22: note = Synthetic
  source 1..22: mol_type = other DNA
gaagcctgaatctgcggtggca

SEQ ID NO: 1012 - DNA, 22 bp, synthetic construct
  misc_feature 1..22: note = Synthetic
  source 1..22: mol_type = other DNA
gaaaaattgggaagcctgaatc

SEQ ID NO: 1013 - DNA, 22 bp, synthetic construct
  misc_feature 1..22: note = Synthetic
  source 1..22: mol_type = other DNA
acagatgccagtattctacagg

SEQ ID NO: 1014 - DNA, 22 bp, synthetic construct
  misc_feature 1..22: note = Synthetic
  source 1..22: mol_type = other DNA
tcagcaatcctcaaaaacagat

SEQ ID NO: 1015 - DNA, 22 bp, synthetic construct
  misc_feature 1..22: note = Synthetic
  source 1..22: mol_type = other DNA
aataattcagcaatcctcaaaa

SEQ ID NO: 1016 - DNA, 22 bp, synthetic construct
  misc_feature 1..22: note = Synthetic
  source 1..22: mol_type = other DNA
gcaactggggaagaaataattc

SEQ ID NO: 1017 - DNA, 22 bp, synthetic construct
  misc_feature 1..22: note = Synthetic
  source 1..22: mol_type = other DNA
cattgaatgcaactggggaaga

SEQ ID NO: 1018 - DNA, 22 bp, synthetic construct
  misc_feature 1..22: note = Synthetic
  source 1..22: mol_type = other DNA
gaacattgaatgcaactgggga

SEQ ID NO: 1019 - DNA, 22 bp, synthetic construct
  misc_feature 1..22: note = Synthetic
  source 1..22: mol_type = other DNA
tcattttttctcataccttctg

SEQ ID NO: 1020 - DNA, 22 bp, synthetic construct
  misc_feature 1..22: note = Synthetic
  source 1..22: mol_type = other DNA
ttttttctcataccttctgctt

SEQ ID NO: 1021 - DNA, 22 bp, synthetic construct
  misc_feature 1..22: note = Synthetic
  source 1..22: mol_type = other DNA
ccttctgcttgatgatcatctc

SEQ ID NO: 1022 - DNA, 22 bp, synthetic construct
  misc_feature 1..22: note = Synthetic
  source 1..22: mol_type = other DNA
atgatcatctcgttgatatcct

SEQ ID NO: 1023 - DNA, 22 bp, synthetic construct
  misc_feature 1..22: note = Synthetic
  source 1..22: mol_type = other DNA
aaggtcacccaccatcaccctc

SEQ ID NO: 1024 - DNA, 22 bp, synthetic construct
  misc_feature 1..22: note = Synthetic
  source 1..22: mol_type = other DNA
atcaccctctgtgattttataa

SEQ ID NO: 1025 - DNA, 22 bp, synthetic construct
  misc_feature 1..22: note = Synthetic
  source 1..22: mol_type = other DNA
ataacttgatcaagcagagaaa

SEQ ID NO: 1026 - DNA, 22 bp, synthetic construct
  misc_feature 1..22: note = Synthetic
  source 1..22: mol_type = other DNA
cttgatcaagcagagaaagcca

SEQ ID NO: 1027 - DNA, 22 bp, synthetic construct
  misc_feature 1..22: note = Synthetic
  source 1..22: mol_type = other DNA
atcaagcagagaaagccagtcg

SEQ ID NO: 1028 - DNA, 22 bp, synthetic construct
  misc_feature 1..22: note = Synthetic
  source 1..22: mol_type = other DNA
cagtcggtaagttctgtccaag

SEQ ID NO: 1029 - DNA, 22 bp, synthetic construct
  misc_feature 1..22: note = Synthetic
  source 1..22: mol_type = other DNA
gtaagttctgtccaagcccggt

SEQ ID NO: 1030 - DNA, 22 bp, synthetic construct
  misc_feature 1..22: note = Synthetic
  source 1..22: mol_type = other DNA
agcccggttgaaatctgccaga

SEQ ID NO: 1031 - DNA, 22 bp, synthetic construct
  misc_feature 1..22: note = Synthetic
  source 1..22: mol_type = other DNA
agcaggtacctccaacatcaag

SEQ ID NO: 1032 - DNA, 22 bp, synthetic construct
  misc_feature 1..22: note = Synthetic
  source 1..22: mol_type = other DNA
caacatcaaggaagatggcatt

SEQ ID NO: 1033 - DNA, 22 bp, synthetic construct
  misc_feature 1..22: note = Synthetic
  source 1..22: mol_type = other DNA
aggaagatggcatttctagttt

SEQ ID NO: 1034 - DNA, 22 bp, synthetic construct
  misc_feature 1..22: note = Synthetic
  source 1..22: mol_type = other DNA
atggcatttctagtttggagat

SEQ ID NO: 1035 - DNA, 22 bp, synthetic construct
  misc_feature 1..22: note = Synthetic
  source 1..22: mol_type = other DNA
ctagtttggagatggcagtttc

SEQ ID NO: 1036 - DNA, 22 bp, synthetic construct
  misc_feature 1..22: note = Synthetic
  source 1..22: mol_type = other DNA
gatggcagtttccttagtaacc

SEQ ID NO: 1037 - DNA, 22 bp, synthetic construct
  misc_feature 1..22: note = Synthetic
  source 1..22: mol_type = other DNA
ccacaggttgtgtcaccagagt

SEQ ID NO: 1038 - DNA, 22 bp, synthetic construct
  misc_feature 1..22: note = Synthetic
  source 1..22: mol_type = other DNA
gagtaacagtctgagtaggagc

SEQ ID NO: 1039 - DNA, 22 bp, synthetic construct
  misc_feature 1..22: note = Synthetic
  source 1..22: mol_type = other DNA
agaaggtatgagaaaaaatgat

SEQ ID NO: 1040 - DNA, 22 bp, synthetic construct
  misc_feature 1..22: note = Synthetic
  source 1..22: mol_type = other DNA
tcaagcagaaggtatgagaaaa

SEQ ID NO: 1041 - DNA, 22 bp, synthetic construct
  misc_feature 1..22: note = Synthetic
  source 1..22: mol_type = other DNA
tcatcaagcagaaggtatgaga

SEQ ID NO: 1042 - DNA, 22 bp, synthetic construct
  misc_feature 1..22: note = Synthetic
  source 1..22: mol_type = other DNA
tcaacgagatgatcatcaagca

SEQ ID NO: 1043 - DNA, 22 bp, synthetic construct
  misc_feature 1..22: note = Synthetic
  source 1..22: mol_type = other DNA
gtgaccttgaggatatcaacga

SEQ ID NO: 1044 - DNA, 22 bp, synthetic construct
  misc_feature 1..22: note = Synthetic
  source 1..22: mol_type = other DNA
tgggtgaccttgaggatatcaa

SEQ ID NO: 1045 - DNA, 22 bp, synthetic construct
  misc_feature 1..22: note = Synthetic
  source 1..22: mol_type = other DNA
aagttataaaatcacagagggt

SEQ ID NO: 1046 - DNA, 22 bp, synthetic construct
  misc_feature 1..22: note = Synthetic
  source 1..22: mol_type = other DNA
atcaagttataaaatcacagag

SEQ ID NO: 1047 - DNA, 22 bp, synthetic construct
  misc_feature 1..22: note = Synthetic
  source 1..22: mol_type = other DNA
ctttctctgcttgatcaagtta

SEQ ID NO: 1048 - DNA, 22 bp, synthetic construct
  misc_feature 1..22: note = Synthetic
  source 1..22: mol_type = other DNA
ccgactggctttctctgcttga

SEQ ID NO: 1049 - DNA, 22 bp, synthetic construct
  misc_feature 1..22: note = Synthetic
  source 1..22: mol_type = other DNA
acttaccgactggctttctctg

SEQ ID NO: 1050 - DNA, 22 bp, synthetic construct
  misc_feature 1..22: note = Synthetic
  source 1..22: mol_type = other DNA
gatgttggaggtacctgctctg

SEQ ID NO: 1051 - DNA, 22 bp, synthetic construct
  misc_feature 1..22: note = Synthetic
  source 1..22: mol_type = other DNA
aaatgccatcttccttgatgtt

SEQ ID NO: 1052 - DNA, 22 bp, synthetic construct
  misc_feature 1..22: note = Synthetic
  source 1..22: mol_type = other DNA
ccaaactagaaatgccatcttc

SEQ ID NO: 1053 - DNA, 22 bp, synthetic construct
  misc_feature 1..22: note = Synthetic
  source 1..22: mol_type = other DNA
aggaaactgccatctccaaact

SEQ ID NO: 1054 - DNA, 22 bp, synthetic construct
  misc_feature 1..22: note = Synthetic
  source 1..22: mol_type = other DNA
ctgttactctggtgacacaacc

SEQ ID NO: 1055 - DNA, 22 bp, synthetic construct
  misc_feature 1..22: note = Synthetic
  source 1..22: mol_type = other DNA
tagctcctactcagactgttac

SEQ ID NO: 1056 - DNA, 22 bp, synthetic construct
  misc_feature 1..22: note = Synthetic
  source 1..22: mol_type = other DNA
aaaaggtatctttgatactaac

SEQ ID NO: 1057 - DNA, 22 bp, synthetic construct
  misc_feature 1..22: note = Synthetic
  source 1..22: mol_type = other DNA
ctttgatactaaccttggtttc

SEQ ID NO: 1058 - DNA, 22 bp, synthetic construct
  misc_feature 1..22: note = Synthetic
  source 1..22: mol_type = other DNA
aacatttcattcaactgttgcc

SEQ ID NO: 1059 - DNA, 22 bp, synthetic construct
  misc_feature 1..22: note = Synthetic
  source 1..22: mol_type = other DNA
ttcaactgttgcctccggttct

SEQ ID NO: 1060 - DNA, 22 bp, synthetic construct
  misc_feature 1..22: note = Synthetic
  source 1..22: mol_type = other DNA
aggtgttcttgtacttcatccc

SEQ ID NO: 1061 - DNA, 22 bp, synthetic construct
  misc_feature 1..22: note = Synthetic
  source 1..22: mol_type = other DNA
ttctttcaactagaataaaagg

SEQ ID NO: 1062 - DNA, 22 bp, synthetic construct
  misc_feature 1..22: note = Synthetic
  source 1..22: mol_type = other DNA
ttcaactagaataaaaggaaaa

SEQ ID NO: 1063 - DNA, 22 bp, synthetic construct
  misc_feature 1..22: note = Synthetic
  source 1..22: mol_type = other DNA
agaataaaaggaaaaataaata

SEQ ID NO: 1064 - DNA, 22 bp, synthetic construct
  misc_feature 1..22: note = Synthetic
  source 1..22: mol_type = other DNA
gttagtatcaaagatacctttt

SEQ ID NO: 1065 - DNA, 22 bp, synthetic construct
  misc_feature 1..22: note = Synthetic
  source 1..22: mol_type = other DNA
cacagaaaccaaggttagtatc

SEQ ID NO: 1066 - DNA, 22 bp, synthetic construct
  misc_feature 1..22: note = Synthetic
  source 1..22: mol_type = other DNA
aaagaaaatcacagaaaccaag

SEQ ID NO: 1067 - DNA, 22 bp, synthetic construct
  misc_feature 1..22: note = Synthetic
  source 1..22: mol_type = other DNA
tccaaaagaaaatcacagaaac

SEQ ID NO: 1068 - DNA, 22 bp, synthetic construct
  misc_feature 1..22: note = Synthetic
  source 1..22: mol_type = other DNA
atacagtagatgcaatccaaaa

SEQ ID NO: 1069 - DNA, 22 bp, synthetic construct
  misc_feature 1..22: note = Synthetic
  source 1..22: mol_type = other DNA
aggagggtccctatacagtaga

SEQ ID NO: 1070 - DNA, 22 bp, synthetic construct
  misc_feature 1..22: note = Synthetic
  source 1..22: mol_type = other DNA
atggaaggagggtccctataca

SEQ ID NO: 1071 - DNA, 22 bp, synthetic construct
  misc_feature 1..22: note = Synthetic
  source 1..22: mol_type = other DNA
agtcatggaaggagggtcccta

SEQ ID NO: 1072 - DNA, 22 bp, synthetic construct
  misc_feature 1..22: note = Synthetic
  source 1..22: mol_type = other DNA
tggaagctaaggaagaagctga

SEQ ID NO: 1073 - DNA, 22 bp, synthetic construct
  misc_feature 1..22: note = Synthetic
  source 1..22: mol_type = other DNA
aatgaaatgttaaaggattcaa

SEQ ID NO: 1074 - DNA, 22 bp, synthetic construct
  misc_feature 1..22: note = Synthetic
  source 1..22: mol_type = other DNA
agaaccggaggcaacagttgaa

SEQ ID NO: 1075 - DNA, 22 bp, synthetic construct
  misc_feature 1..22: note = Synthetic
  source 1..22: mol_type = other DNA
gaacaccttcagaaccggaggc

SEQ ID NO: 1076 - DNA, 22 bp, synthetic construct
  misc_feature 1..22: note = Synthetic
  source 1..22: mol_type = other DNA
aaagaattcagaatcagtggga

SEQ ID NO: 1077 - DNA, 22 bp, synthetic construct
  misc_feature 1..22: note = Synthetic
  source 1..22: mol_type = other DNA
attctagttgaaagaattcaga

SEQ ID NO: 1078 - DNA, 22 bp, synthetic construct
  misc_feature 1..22: note = Synthetic
  source 1..22: mol_type = other DNA
atatatttatttttccttttat

SEQ ID NO: 1079-1999 - skipped (921 entries)

SEQ ID NO: 2000 - DNA, 22 bp, synthetic construct
  misc_feature 1..22: note = Synthetic
  source 1..22: mol_type = other DNA
ccctacctcttttttctgtctg

SEQ ID NO: 2001 - DNA, 22 bp, synthetic construct
  misc_feature 1..22: note = Synthetic
  source 1..22: mol_type = other DNA
tttttctgtctgacagctgttt

SEQ ID NO: 2002 - DNA, 22 bp, synthetic construct
  misc_feature 1..22: note = Synthetic
  source 1..22: mol_type = other DNA
tgtttgcagacctcctgccacc

SEQ ID NO: 2003 - DNA, 22 bp, synthetic construct
  misc_feature 1..22: note = Synthetic
  source 1..22: mol_type = other DNA
cagacctcctgccaccgcagat

SEQ ID NO: 2004 - DNA, 22 bp, synthetic construct
  misc_feature 1..22: note = Synthetic
  source 1..22: mol_type = other DNA
ttcaggcttcccaatttttcct

SEQ ID NO: 2005 - DNA, 22 bp, synthetic construct
  misc_feature 1..22: note = Synthetic
  source 1..22: mol_type = other DNA
gtagaatactggcatctgtttt

SEQ ID NO: 2006 - DNA, 22 bp, synthetic construct
  misc_feature 1..22: note = Synthetic
  source 1..22: mol_type = other DNA
ggattgctgaattatttcttcc

SEQ ID NO: 2007 - DNA, 22 bp, synthetic construct
  misc_feature 1..22: note = Synthetic
  source 1..22: mol_type = other DNA
agttgcattcaatgttctgaca

SEQ ID NO: 2008 - DNA, 22 bp, synthetic construct
  misc_feature 1..22: note = Synthetic
  source 1..22: mol_type = other DNA
tgccgctgcccaatgccatcct

SEQ ID NO: 2009 - DNA, 22 bp, synthetic construct
  misc_feature 1..22: note = Synthetic
  source 1..22: mol_type = other DNA
caatgccatcctggagttcctg

SEQ ID NO: 2010 - DNA, 22 bp, synthetic construct
  misc_feature 1..22: note = Synthetic
  source 1..22: mol_type = other DNA
tggagttcctgtaagataccaa

SEQ ID NO: 2011 - DNA, 22 bp, synthetic construct
  misc_feature 1..22: note = Synthetic
  source 1..22: mol_type = other DNA
aagaggtagggcgacagatcta

SEQ ID NO: 2012 - DNA, 22 bp, synthetic construct
  misc_feature 1..22: note = Synthetic
  source 1..22: mol_type = other DNA
gacagaaaaaagaggtagggcg

SEQ ID NO: 2013 - DNA, 22 bp, synthetic construct
  misc_feature 1..22: note = Synthetic
  source 1..22: mol_type = other DNA
agctgtcagacagaaaaaagag

SEQ ID NO: 2014 - DNA, 22 bp, synthetic construct
  misc_feature 1..22: note = Synthetic
  source 1..22: mol_type = other DNA
aaacagctgtcagacagaaaaa

SEQ ID NO: 2015 - DNA, 22 bp, synthetic construct
  misc_feature 1..22: note = Synthetic
  source 1..22: mol_type = other DNA
gcaaacagctgtcagacagaaa

SEQ ID NO: 2016 - DNA, 22 bp, synthetic construct
  misc_feature 1..22: note = Synthetic
  source 1..22: mol_type = other DNA
gaggtctgcaaacagctgtcag

SEQ ID NO: 2017 - DNA, 22 bp, synthetic construct
  misc_feature 1..22: note = Synthetic
  source 1..22: mol_type = other DNA
gcaggaggtctgcaaacagctg

SEQ ID NO: 2018 - DNA, 22 bp, synthetic construct
  misc_feature 1..22: note = Synthetic
  source 1..22: mol_type = other DNA
tgcggtggcaggaggtctgcaa

SEQ ID NO: 2019 - DNA, 22 bp, synthetic construct
  misc_feature 1..22: note = Synthetic
  source 1..22: mol_type = other DNA
gaagcctgaatctgcggtggca

SEQ ID NO: 2020 - DNA, 22 bp, synthetic construct
  misc_feature 1..22: note = Synthetic
  source 1..22: mol_type = other DNA
tgggaagcctgaatctgcggtg

SEQ ID NO: 2021 - DNA, 22 bp, synthetic construct
  misc_feature 1..22: note = Synthetic
  source 1..22: mol_type = other DNA
agtattctacaggaaaaattgg

SEQ ID NO: 2022 - DNA, 22 bp, synthetic construct
  misc_feature 1..22: note = Synthetic
  source 1..22: mol_type = other DNA
caaaaacagatgccagtattct

SEQ ID NO: 2023 - DNA, 22 bp, synthetic construct
  misc_feature 1..22: note = Synthetic
  source 1..22: mol_type = other DNA
cagcaatcctcaaaaacagatg

SEQ ID NO: 2024 - DNA, 22 bp, synthetic construct
  misc_feature 1..22: note = Synthetic
  source 1..22: mol_type = other DNA
aataattcagcaatcctcaaaa

SEQ ID NO: 2025 - DNA, 22 bp, synthetic construct
  misc_feature 1..22: note = Synthetic
  source 1..22: mol_type = other DNA
atgcaactggggaagaaataat

SEQ ID NO: 2026 - DNA, 22 bp, synthetic construct
  misc_feature 1..22: note = Synthetic
  source 1..22: mol_type = other DNA
cagaacattgaatgcaactggg

SEQ ID NO: 2027 - DNA, 22 bp, synthetic construct
  misc_feature 1..22: note = Synthetic
  source 1..22: mol_type = other DNA
attgggcagcggcaaactgttg

SEQ ID NO: 2028 - DNA, 22 bp, synthetic construct
  misc_feature 1..22: note = Synthetic
  source 1..22: mol_type = other DNA
aggaactccaggatggcattgg

SEQ ID NO: 2029 - DNA, 22 bp, synthetic construct
  misc_feature 1..22: note = Synthetic
  source 1..22: mol_type = other DNA
tttttggtatcttacaggaact

SEQ ID NO: 2030 - DNA, 22 bp, synthetic construct
  misc_feature 1..22: note = Synthetic
  source 1..22: mol_type = other DNA
tgttttgcctttttggtatctt

SEQ ID NO: 2031 - DNA, 22 bp, synthetic construct
  misc_feature 1..22: note = Synthetic
  source 1..22: mol_type = other DNA
atgatcatctcgttgatatcct

SEQ ID NO: 2032 - DNA, 22 bp, synthetic construct
  misc_feature 1..22: note = Synthetic
  source 1..22: mol_type = other DNA
ctctgtgattttataacttgat

SEQ ID NO: 2033 - DNA, 22 bp, synthetic construct
  misc_feature 1..22: note = Synthetic
  source 1..22: mol_type = other DNA
tgtgattttataacttgatcaa

SEQ ID NO: 2034 - DNA, 22 bp, synthetic construct
  misc_feature 1..22: note = Synthetic
  source 1..22: mol_type = other DNA
tgattttataacttgatcaagc

SEQ ID NO: 2035 - DNA, 22 bp, synthetic construct
  misc_feature 1..22: note = Synthetic
  source 1..22: mol_type = other DNA
tttataacttgatcaagcagag

SEQ ID NO: 2036 - DNA, 22 bp, synthetic construct
  misc_feature 1..22: note = Synthetic
  source 1..22: mol_type = other DNA
taacttgatcaagcagagaaag

SEQ ID NO: 2037 - DNA, 22 bp, synthetic construct
  misc_feature 1..22: note = Synthetic
  source 1..22: mol_type = other DNA
tcaagcagagaaagccagtcgg

SEQ ID NO: 2038 - DNA, 22 bp, synthetic construct
  misc_feature 1..22: note = Synthetic
  source 1..22: mol_type = other DNA
aagccagtcggtaagttctgtc

SEQ ID NO: 2039 - DNA, 22 bp, synthetic construct
  misc_feature 1..22: note = Synthetic
  source 1..22: mol_type = other DNA
gtccaagcccggttgaaatctg

SEQ ID NO: 2040 - DNA, 22 bp, synthetic construct
  misc_feature 1..22: note = Synthetic
  source 1..22: mol_type = other DNA
ccaagcccggttgaaatctgcc

SEQ ID NO: 2041 - DNA, 22 bp, synthetic construct
  misc_feature 1..22: note = Synthetic
  source 1..22: mol_type = other DNA
agcccggttgaaatctgccaga

SEQ ID NO: 2042 - DNA, 22 bp, synthetic construct
  misc_feature 1..22: note = Synthetic
  source 1..22: mol_type = other DNA
ccagagcaggtacctccaacat

SEQ ID NO: 2043 - DNA, 22 bp, synthetic construct
  misc_feature 1..22: note = Synthetic
  source 1..22: mol_type = other DNA
agcaggtacctccaacatcaag

SEQ ID NO: 2044 - DNA, 22 bp, synthetic construct
  misc_feature 1..22: note = Synthetic
  source 1..22: mol_type = other DNA
aacatcaaggaagatggcattt

SEQ ID NO: 2045 - DNA, 22 bp, synthetic construct
  misc_feature 1..22: note = Synthetic
  source 1..22: mol_type = other DNA
aggaagatggcatttctagttt

SEQ ID NO: 2046 - DNA, 22 bp, synthetic construct
  misc_feature 1..22: note = Synthetic
  source 1..22: mol_type = other DNA
tggcatttctagtttggagatg

SEQ ID NO: 2047 - DNA, 22 bp, synthetic construct
  misc_feature 1..22: note = Synthetic
  source 1..22: mol_type = other DNA
tagtttggagatggcagtttcc

SEQ ID NO: 2048 - DNA, 22 bp, synthetic construct
  misc_feature 1..22: note = Synthetic
  source 1..22: mol_type = other DNA
gatggcagtttccttagtaacc

SEQ ID NO: 2049 - DNA, 22 bp, synthetic construct
  misc_feature 1..22: note = Synthetic
  source 1..22: mol_type = other DNA
ttagtaaccacaggttgtgtca

SEQ ID NO: 2050 - DNA, 22 bp, synthetic construct
  misc_feature 1..22: note = Synthetic
  source 1..22: mol_type = other DNA
agtaaccacaggttgtgtcacc

SEQ ID NO: 2051 - DNA, 22 bp, synthetic construct
  misc_feature 1..22: note = Synthetic
  source 1..22: mol_type = other DNA
cacaggttgtgtcaccagagta

SEQ ID NO: 2052 - DNA, 22 bp, synthetic construct
  misc_feature 1..22: note = Synthetic
  source 1..22: mol_type = other DNA
ttgtgtcaccagagtaacagtc

SEQ ID NO: 2053 - DNA, 22 bp, synthetic construct
  misc_feature 1..22: note = Synthetic
  source 1..22: mol_type = other DNA
tgtcaccagagtaacagtctga

SEQ ID NO: 2054 - DNA, 22 bp, synthetic construct
  misc_feature 1..22: note = Synthetic
  source 1..22: mol_type = other DNA
caccagagtaacagtctgagta

SEQ ID NO: 2055 - DNA, 22 bp, synthetic construct
  misc_feature 1..22: note = Synthetic
  source 1..22: mol_type = other DNA
aaaatattttgggtttttgcaa

SEQ ID NO: 2056 - DNA, 22 bp, synthetic construct
  misc_feature 1..22: note = Synthetic
  source 1..22: mol_type = other DNA
gaaaaaatgataaaagttggca

SEQ ID NO: 2057 - DNA, 22 bp, synthetic construct
  misc_feature 1..22: note = Synthetic
  source 1..22: mol_type = other DNA
tgagaaaaaatgataaaagttg

SEQ ID NO: 2058 - DNA, 22 bp, synthetic construct
  misc_feature 1..22: note = Synthetic
  source 1..22: mol_type = other DNA
gaaggtatgagaaaaaatgata

SEQ ID NO: 2059 - DNA, 22 bp, synthetic construct
  misc_feature 1..22: note = Synthetic
  source 1..22: mol_type = other DNA
gatgatcatcaagcagaaggta

SEQ ID NO: 2060 - DNA, 22 bp, synthetic construct
  misc_feature 1..22: note = Synthetic
  source 1..22: mol_type = other DNA
tcaacgagatgatcatcaagca

SEQ ID NO: 2061 - DNA, 22 bp, synthetic construct
  misc_feature 1..22: note = Synthetic
  source 1..22: mol_type = other DNA
atatcaacgagatgatcatcaa

SEQ ID NO: 2062 - DNA, 22 bp, synthetic construct
  misc_feature 1..22: note = Synthetic
  source 1..22: mol_type = other DNA
aggatatcaacgagatgatcat

SEQ ID NO: 2063 - DNA, 22 bp, synthetic construct
  misc_feature 1..22: note = Synthetic
  source 1..22: mol_type = other DNA
tgggtgaccttgaggatatcaa

SEQ ID NO: 2064 - DNA, 22 bp, synthetic construct
  misc_feature 1..22: note = Synthetic
  source 1..22: mol_type = other DNA
agagggtgatggtgggtgacct

SEQ ID NO: 2065 - DNA, 22 bp, synthetic construct
  misc_feature 1..22: note = Synthetic
  source 1..22: mol_type = other DNA
cttgatcaagttataaaatcac

SEQ ID NO: 2066 - DNA, 22 bp, synthetic construct
  misc_feature 1..22: note = Synthetic
  source 1..22: mol_type = other DNA
tgcttgatcaagttataaaatc

SEQ ID NO: 2067 - DNA, 22 bp, synthetic construct
  misc_feature 1..22: note = Synthetic
  source 1..22: mol_type = other DNA
cgactggctttctctgcttgat

SEQ ID NO: 2068 - DNA, 22 bp, synthetic construct
  misc_feature 1..22: note = Synthetic
  source 1..22: mol_type = other DNA
ggcagatttcaaccgggcttgg

SEQ ID NO: 2069 - DNA, 22 bp, synthetic construct
  misc_feature 1..22: note = Synthetic
  source 1..22: mol_type = other DNA
gatgttggaggtacctgctctg

SEQ ID NO: 2070 - DNA, 22 bp, synthetic construct
  misc_feature 1..22: note = Synthetic
  source 1..22: mol_type = other DNA
aaatgccatcttccttgatgtt

SEQ ID NO: 2071 - DNA, 22 bp, synthetic construct
  misc_feature 1..22: note = Synthetic
  source 1..22: mol_type = other DNA
taaggaaactgccatctccaaa

SEQ ID NO: 2072 - DNA, 22 bp, synthetic construct
  misc_feature 1..22: note = Synthetic
  source 1..22: mol_type = other DNA
tggtgacacaacctgtggttac

SEQ ID NO: 2073 - DNA, 22 bp, synthetic construct
  misc_feature 1..22: note = Synthetic
  source 1..22: mol_type = other DNA
cccaaaatattttagctcctac

SEQ ID NO: 2074 - DNA, 22 bp, synthetic construct
  misc_feature 1..22: note = Synthetic
  source 1..22: mol_type = other DNA
ttttgcaaaaacccaaaatatt

SEQ ID NO: 2075 - DNA, 22 bp, synthetic construct
  misc_feature 1..22: note = Synthetic
  source 1..22: mol_type = other DNA
tcttttggattgcatctactgt

SEQ ID NO: 2076 - DNA, 22 bp, synthetic construct
  misc_feature 1..22: note = Synthetic
  source 1..22: mol_type = other DNA
tagggaccctccttccatgact

SEQ ID NO: 2077 - DNA, 22 bp, synthetic construct
  misc_feature 1..22: note = Synthetic
  source 1..22: mol_type = other DNA
caagcttggctctggcctgtcc

SEQ ID NO: 2078 - DNA, 22 bp, synthetic construct
  misc_feature 1..22: note = Synthetic
  source 1..22: mol_type = other DNA
tctggcctgtcctaagacctgc

SEQ ID NO: 2079 - DNA, 22 bp, synthetic construct
  misc_feature 1..22: note = Synthetic
  source 1..22: mol_type = other DNA
taagacctgctcagcttcttcc

SEQ ID NO: 2080 - DNA, 22 bp, synthetic construct
  misc_feature 1..22: note = Synthetic
  source 1..22: mol_type = other DNA
tgctcagcttcttccttagctt

SEQ ID NO: 2081 - DNA, 22 bp, synthetic construct
  misc_feature 1..22: note = Synthetic
  source 1..22: mol_type = other DNA
ttcaactgttgcctccggttct

SEQ ID NO: 2082 - DNA, 22 bp, synthetic construct
  misc_feature 1..22: note = Synthetic
  source 1..22: mol_type = other DNA
cactgattctgaattctttcaa

SEQ ID NO: 2083 - DNA, 22 bp, synthetic construct
  misc_feature 1..22: note = Synthetic
  source 1..22: mol_type = other DNA
ctgaattctttcaactagaata

SEQ ID NO: 2084 - DNA, 22 bp, synthetic construct
  misc_feature 1..22: note = Synthetic
  source 1..22: mol_type = other DNA
gaataaaaggaaaaataaatat

SEQ ID NO: 2085 - DNA, 22 bp, synthetic construct
  misc_feature 1..22: note = Synthetic
  source 1..22: mol_type = other DNA
taaaaggaaaaataaatatata

SEQ ID NO: 2086 - DNA, 22 bp, synthetic construct
  misc_feature 1..22: note = Synthetic
  source 1..22: mol_type = other DNA
cacagaaaccaaggttagtatc

SEQ ID NO: 2087 - DNA, 22 bp, synthetic construct
  misc_feature 1..22: note = Synthetic
  source 1..22: mol_type = other DNA
aagaaaatcacagaaaccaagg

SEQ ID NO: 2088 - DNA, 22 bp, synthetic construct
  misc_feature 1..22: note = Synthetic
  source 1..22: mol_type = other DNA
tccaaaagaaaatcacagaaac

SEQ ID NO: 2089 - DNA, 22 bp, synthetic construct
  misc_feature 1..22: note = Synthetic
  source 1..22: mol_type = other DNA
agatgcaatccaaaagaaaatc

SEQ ID NO: 2090 - DNA, 22 bp, synthetic construct
  misc_feature 1..22: note = Synthetic
  source 1..22: mol_type = other DNA
cctatacagtagatgcaatcca

SEQ ID NO: 2091 - DNA, 22 bp, synthetic construct
  misc_feature 1..22: note = Synthetic
  source 1..22: mol_type = other DNA
atggaaggagggtccctataca

SEQ ID NO: 2092 - DNA, 22 bp, synthetic construct
  misc_feature 1..22: note = Synthetic
  source 1..22: mol_type = other DNA
gtcatggaaggagggtccctat

SEQ ID NO: 2093 - DNA, 22 bp, synthetic construct
  misc_feature 1..22: note = Synthetic
  source 1..22: mol_type = other DNA
gagccaagcttgagtcatggaa

SEQ ID NO: 2094 - DNA, 22 bp, synthetic construct
  misc_feature 1..22: note = Synthetic
  source 1..22: mol_type = other DNA
ccagagccaagcttgagtcatg

SEQ ID NO: 2095 - DNA, 22 bp, synthetic construct
  misc_feature 1..22: note = Synthetic
  source 1..22: mol_type = other DNA
taggacaggccagagccaagct

SEQ ID NO: 2096 - DNA, 22 bp, synthetic construct
  misc_feature 1..22: note = Synthetic
  source 1..22: mol_type = other DNA
aggtcttaggacaggccagagc

SEQ ID NO: 2097 - DNA, 22 bp, synthetic construct
  misc_feature 1..22: note = Synthetic
  source 1..22: mol_type = other DNA
tgagcaggtcttaggacaggcc

SEQ ID NO: 2098 - DNA, 22 bp, synthetic construct
  misc_feature 1..22: note = Synthetic
  source 1..22: mol_type = other DNA
gctgagcaggtcttaggacagg

SEQ ID NO: 2099 - DNA, 22 bp, synthetic construct
  misc_feature 1..22: note = Synthetic
  source 1..22: mol_type = other DNA
aagaagctgagcaggtcttagg

SEQ ID NO: 2100 - DNA, 22 bp, synthetic construct
  misc_feature 1..22: note = Synthetic
  source 1..22: mol_type = other DNA
taaggaagaagctgagcaggtc

SEQ ID NO: 2101 - DNA, 22 bp, synthetic construct
  misc_feature 1..22: note = Synthetic
  source 1..22: mol_type = other DNA
tggaagctaaggaagaagctga

SEQ ID NO: 2102 - DNA, 22 bp, synthetic construct
  misc_feature 1..22: note = Synthetic
  source 1..22: mol_type = other DNA
ggctggaagctaaggaagaagc

SEQ ID NO: 2103 - DNA, 22 bp, synthetic construct
  misc_feature 1..22: note = Synthetic
  source 1..22: mol_type = other DNA
acaatggctggaagctaaggaa

SEQ ID NO: 2104 - DNA, 22 bp, synthetic construct
  misc_feature 1..22: note = Synthetic
  source 1..22: mol_type = other DNA
aacacaatggctggaagctaag

SEQ ID NO: 2105 - DNA, 22 bp, synthetic construct
  misc_feature 1..22: note = Synthetic
  source 1..22: mol_type = other DNA
attcaacacaatggctggaagc

SEQ ID NO: 2106 - DNA, 22 bp, synthetic construct
  misc_feature 1..22: note = Synthetic
  source 1..22: mol_type = other DNA
aaaggattcaacacaatggctg

SEQ ID NO: 2107 - DNA, 22 bp, synthetic construct
  misc_feature 1..22: note = Synthetic
  source 1..22: mol_type = other DNA
ggcaacagttgaatgaaatgtt

SEQ ID NO: 2108 - DNA, 22 bp, synthetic construct
  misc_feature 1..22: note = Synthetic
  source 1..22: mol_type = other DNA
aacaccttcagaaccggaggca

SEQ ID NO: 2109 - DNA, 22 bp, synthetic construct
  misc_feature 1..22: note = Synthetic
  source 1..22: mol_type = other DNA
gtacaagaacaccttcagaacc

SEQ ID NO: 2110 - DNA, 22 bp, synthetic construct
  misc_feature 1..22: note = Synthetic
  source 1..22: mol_type = other DNA
gggatgaagtacaagaacacct

SEQ ID NO: 2111 - DNA, 22 bp, synthetic construct
  misc_feature 1..22: note = Synthetic
  source 1..22: mol_type = other DNA
tcagaatcagtgggatgaagta

SEQ ID NO: 2112 - DNA, 22 bp, synthetic construct
  misc_feature 1..22: note = Synthetic
  source 1..22: mol_type = other DNA
aagaattcagaatcagtgggat

SEQ ID NO: 2113 - DNA, 22 bp, synthetic construct
  misc_feature 1..22: note = Synthetic
  source 1..22: mol_type = other DNA
ttctagttgaaagaattcagaa

SEQ ID NO: 2114 - DNA, 22 bp, synthetic construct
  misc_feature 1..22: note = Synthetic
  source 1..22: mol_type = other DNA
cttttattctagttgaaagaat

SEQ ID NO: 2115 - DNA, 22 bp, synthetic construct
  misc_feature 1..22: note = Synthetic
  source 1..22: mol_type = other DNA
atttttccttttattctagttg

SEQ ID NO: 2116 - DNA, 22 bp, synthetic construct
  misc_feature 1..22: note = Synthetic
  source 1..22: mol_type = other DNA
tatatttatttttccttttatt

SEQ ID NO: 2117-2999 - skipped (883 entries)

SEQ ID NO: 3000 - DNA, 20 bp, synthetic construct
  misc_feature 1..20: note = Synthetic
  source 1..20: mol_type = other DNA
aatgctgctgtcttcttgct

SEQ ID NO: 3001 - DNA, 21 bp, synthetic construct
  misc_feature 1..21: note = Synthetic
  source 1..21: mol_type = other DNA
caatgctgctgtcttcttgct

SEQ ID NO: 3002 - DNA, 20 bp, synthetic construct
  misc_feature 1..20: note = Synthetic
  source 1..20: mol_type = other DNA
aacaaaatgtacaaggaccg

SEQ ID NO: 3003 - DNA, 21 bp, synthetic construct
  misc_feature 1..21: note = Synthetic
  source 1..21: mol_type = other DNA
aacaaaatgtacaaggaccga

SEQ ID NO: 3004 - DNA, 20 bp, synthetic construct
  misc_feature 1..20: note = Synthetic
  source 1..20: mol_type = other DNA
tgcaaagtgcaacgcctgtg

SEQ ID NO: 3005 - DNA, 21 bp, synthetic construct
  misc_feature 1..21: note = Synthetic
  source 1..21: mol_type = other DNA
tgcaaagtgcaacgcctgtgg

SEQ ID NO: 3006 - DNA, 20 bp, synthetic construct
  misc_feature 1..20: note = Synthetic
  source 1..20: mol_type = other DNA
atagtctacaacaaagctca

SEQ ID NO: 3007 - DNA, 21 bp, synthetic construct
  misc_feature 1..21: note = Synthetic
  source 1..21: mol_type = other DNA
atagtctacaacaaagctcag

SEQ ID NO: 3008 - DNA, 20 bp, synthetic construct
  misc_feature 1..20: note = Synthetic
  source 1..20: mol_type = other DNA
ctgttttaaaatttttatat

SEQ ID NO: 3009 - DNA, 21 bp, synthetic construct
  misc_feature 1..21: note = Synthetic
  source 1..21: mol_type = other DNA
ctgttttaaaatttttatatt

SEQ ID NO: 3010 - DNA, 20 bp, synthetic construct
  misc_feature 1..20: note = Synthetic
  source 1..20: mol_type = other DNA
ttagcatgttcccaattctc

SEQ ID NO: 3011 - DNA, 21 bp, synthetic construct
  misc_feature 1..21: note = Synthetic
  source 1..21: mol_type = other DNA
tttagcatgttcccaattctc

SEQ ID NO: 3012 - DNA, 20 bp, synthetic construct
  misc_feature 1..20: note = Synthetic
  source 1..20: mol_type = other DNA
tcgcctgcaggtaaaagcat

SEQ ID NO: 3013 - DNA, 21 bp, synthetic construct
  misc_feature 1..21: note = Synthetic
  source 1..21: mol_type = other DNA
atcgcctgcaggtaaaagcat

SEQ ID NO: 3014 - DNA, 20 bp, synthetic construct
  misc_feature 1..20: note = Synthetic
  source 1..20: mol_type = other DNA
tctcagaaagacacaaattc

SEQ ID NO: 3015 - DNA, 21 bp, synthetic construct
  misc_feature 1..21: note = Synthetic
  source 1..21: mol_type = other DNA
tctcagaaagacacaaattcc

SEQ ID NO: 3016 - DNA, 20 bp, synthetic construct
  misc_feature 1..20: note = Synthetic
  source 1..20: mol_type = other DNA
aggcttcccaatttttcctg

SEQ ID NO: 3017 - DNA, 21 bp, synthetic construct
  misc_feature 1..21: note = Synthetic
  source 1..21: mol_type = other DNA
caggcttcccaatttttcctg

SEQ ID NO: 3018 - DNA, 20 bp, synthetic construct
  misc_feature 1..20: note = Synthetic
  source 1..20: mol_type = other DNA
gaatactggcatctgttttt

SEQ ID NO: 3019 - DNA, 21 bp, synthetic construct
  misc_feature 1..21: note = Synthetic
  source 1..21: mol_type = other DNA
agaatactggcatctgttttt

SEQ ID NO: 3020 - DNA, 20 bp, synthetic construct
  misc_feature 1..20: note = Synthetic
  source 1..20: mol_type = other DNA
gcatctgtttttgaggattg

SEQ ID NO: 3021 - DNA, 21 bp, synthetic construct
  misc_feature 1..21: note = Synthetic
  source 1..21: mol_type = other DNA
ggcatctgtttttgaggattg

SEQ ID NO: 3022 - DNA, 20 bp, synthetic construct
  misc_feature 1..20: note = Synthetic
  source 1..20: mol_type = other DNA
gccgctgcccaatgccatcc

SEQ ID NO: 3023 - DNA, 21 bp, synthetic construct
  misc_feature 1..21: note = Synthetic
  source 1..21: mol_type = other DNA
tgccgctgcccaatgccatcc

SEQ ID NO: 3024 - DNA, 20 bp, synthetic construct
  misc_feature 1..20: note = Synthetic
  source 1..20: mol_type = other DNA
gaggtagggcgacagatcta

SEQ ID NO: 3025 - DNA, 21 bp, synthetic construct
  misc_feature 1..21: note = Synthetic
  source 1..21: mol_type = other DNA
gaggtagggcgacagatctaa

SEQ ID NO: 3026 - DNA, 20 bp, synthetic construct
  misc_feature 1..20: note = Synthetic
  source 1..20: mol_type = other DNA
tctacaggaaaaattgggaa

SEQ ID NO: 3027 - DNA, 21 bp, synthetic construct
  misc_feature 1..21: note = Synthetic
  source 1..21: mol_type = other DNA
tctacaggaaaaattgggaag

SEQ ID NO: 3028 - DNA, 20 bp, synthetic construct
  misc_feature 1..20: note = Synthetic
  source 1..20: mol_type = other DNA
gcggcaaactgttgtcagaa

SEQ ID NO: 3029 - DNA, 21 bp, synthetic construct
  misc_feature 1..21: note = Synthetic
  source 1..21: mol_type = other DNA
gcggcaaactgttgtcagaac

SEQ ID NO: 3030 - DNA, 20 bp, synthetic construct
  misc_feature 1..20: note = Synthetic
  source 1..20: mol_type = other DNA
ttttggtatcttacaggaac

SEQ ID NO: 3031 - DNA, 21 bp, synthetic construct
  misc_feature 1..21: note = Synthetic
  source 1..21: mol_type = other DNA
ttttggtatcttacaggaact

SEQ ID NO: 3032 - DNA, 20 bp, synthetic construct
  misc_feature 1..20: note = Synthetic
  source 1..20: mol_type = other DNA
actattggagcctgtaagta

SEQ ID NO: 3033 - DNA, 21 bp, synthetic construct
  misc_feature 1..21: note = Synthetic
  source 1..21: mol_type = other DNA
actattggagcctgtaagtat

SEQ ID NO: 3034 - DNA, 20 bp, synthetic construct
  misc_feature 1..20: note = Synthetic
  source 1..20: mol_type = other DNA
aggaagttagaagatctgag

SEQ ID NO: 3035 - DNA, 21 bp, synthetic construct
  misc_feature 1..21: note = Synthetic
  source 1..21: mol_type = other DNA
aggaagttagaagatctgagc

SEQ ID NO: 3036 - DNA, 20 bp, synthetic construct
  misc_feature 1..20: note = Synthetic
  source 1..20: mol_type = other DNA
gtaaccacaggttgtgtcac

SEQ ID NO: 3037 - DNA, 21 bp, synthetic construct
  misc_feature 1..21: note = Synthetic
  source 1..21: mol_type = other DNA
agtaaccacaggttgtgtcac

SEQ ID NO: 3038 - DNA, 20 bp, synthetic construct
  misc_feature 1..20: note = Synthetic
  source 1..20: mol_type = other DNA
tgtgtcaccagagtaacagt

SEQ ID NO: 3039 - DNA, 21 bp, synthetic construct
  misc_feature 1..21: note = Synthetic
  source 1..21: mol_type = other DNA
ttgtgtcaccagagtaacagt

SEQ ID NO: 3040 - DNA, 20 bp, synthetic construct
  misc_feature 1..20: note = Synthetic
  source 1..20: mol_type = other DNA
tgagtaggagctaaaatatt

SEQ ID NO: 3041 - DNA, 21 bp, synthetic construct
  misc_feature 1..21: note = Synthetic
  source 1..21: mol_type = other DNA
ctgagtaggagctaaaatatt

SEQ ID NO: 3042 - DNA, 20 bp, synthetic construct
  misc_feature 1..20: note = Synthetic
  source 1..20: mol_type = other DNA
gagggtgatggtgggtgacc

SEQ ID NO: 3043 - DNA, 21 bp, synthetic construct
  misc_feature 1..21: note = Synthetic
  source 1..21: mol_type = other DNA
gagggtgatggtgggtgacct

SEQ ID NO: 3044 - DNA, 20 bp, synthetic construct
  misc_feature 1..20: note = Synthetic
  source 1..20: mol_type = other DNA
tataaaatcacagagggtga

SEQ ID NO: 3045 - DNA, 21 bp, synthetic construct
  misc_feature 1..21: note = Synthetic
  source 1..21: mol_type = other DNA
tataaaatcacagagggtgat

SEQ ID NO: 3046 - DNA, 20 bp, synthetic construct
  misc_feature 1..20: note = Synthetic
  source 1..20: mol_type = other DNA
ttgatcaagttataaaatca

SEQ ID NO: 3047 - DNA, 21 bp, synthetic construct
  misc_feature 1..21: note = Synthetic
  source 1..21: mol_type = other DNA
ttgatcaagttataaaatcac

SEQ ID NO: 3048 - DNA, 20 bp, synthetic construct
  misc_feature 1..20: note = Synthetic
  source 1..20: mol_type = other DNA
ttggtttctgtgattttctt

SEQ ID NO: 3049 - DNA, 21 bp, synthetic construct
  misc_feature 1..21: note = Synthetic
  source 1..21: mol_type = other DNA
cttggtttctgtgattttctt

SEQ ID NO: 3050 - DNA, 20 bp, synthetic construct
  misc_feature 1..20: note = Synthetic
  source 1..20: mol_type = other DNA
cttagcttccagccattgtg

SEQ ID NO: 3051 - DNA, 21 bp, synthetic construct
  misc_feature 1..21: note = Synthetic
  source 1..21: mol_type = other DNA
ccttagcttccagccattgtg

SEQ ID NO: 3052 - DNA, 20 bp, synthetic construct
  misc_feature 1..20: note = Synthetic
  source 1..20: mol_type = other DNA
tgtacttcatcccactgatt

SEQ ID NO: 3053 - DNA, 21 bp, synthetic construct
  misc_feature 1..21: note = Synthetic
  source 1..21: mol_type = other DNA
ttgtacttcatcccactgatt

SEQ ID NO: 3054 - DNA, 20 bp, synthetic construct
  misc_feature 1..20: note = Synthetic
  source 1..20: mol_type = other DNA
tgattctgaattctttcaac

SEQ ID NO: 3055 - DNA, 21 bp, synthetic construct
  misc_feature 1..21: note = Synthetic
  source 1..21: mol_type = other DNA
ctgattctgaattctttcaac

SEQ ID NO: 3056 - DNA, 20 bp, synthetic construct
  misc_feature 1..20: note = Synthetic
  source 1..20: mol_type = other DNA
agccaagcttgagtcatgga

SEQ ID NO: 3057 - DNA, 21 bp, synthetic construct
  misc_feature 1..21: note = Synthetic
  source 1..21: mol_type = other DNA
agccaagcttgagtcatggaa

SEQ ID NO: 3058 - DNA, 20 bp, synthetic construct
  misc_feature 1..20: note = Synthetic
  source 1..20: mol_type = other DNA
ttaggacaggccagagccaa

SEQ ID NO: 3059 - DNA, 21 bp, synthetic construct
  misc_feature 1..21: note = Synthetic
  source 1..21: mol_type = other DNA
ttaggacaggccagagccaag

SEQ ID NO: 3060 - DNA, 20 bp, synthetic construct
  misc_feature 1..20: note = Synthetic
  source 1..20: mol_type = other DNA
gcaacagttgaatgaaatgt

SEQ ID NO: 3061 - DNA, 21 bp, synthetic construct
  misc_feature 1..21: note = Synthetic
  source 1..21: mol_type = other DNA
gcaacagttgaatgaaatgtt

SEQ ID NO: 3062 - DNA, 20 bp, synthetic construct
  misc_feature 1..20: note = Synthetic
  source 1..20: mol_type = other DNA
ccttcagaaccggaggcaac

SEQ ID NO: 3063 - DNA, 21 bp, synthetic construct
  misc_feature 1..21: note = Synthetic
  source 1..21: mol_type = other DNA
ccttcagaaccggaggcaaca

SEQ ID NO: 3064 - DNA, 20 bp, synthetic construct
  misc_feature 1..20: note = Synthetic
  source 1..20: mol_type = other DNA
agttgaaagaattcagaatc

SEQ ID NO: 3065 - DNA, 21 bp, synthetic construct
  misc_feature 1..21: note = Synthetic
  source 1..21: mol_type = other DNA
agttgaaagaattcagaatca

SEQ ID NO: 3066 - DNA, 20 bp, synthetic construct
  misc_feature 1..20: note = Synthetic
  source 1..20: mol_type = other DNA
ttttattctagttgaaagaa

SEQ ID NO: 3067 - DNA, 21 bp, synthetic construct
  misc_feature 1..21: note = Synthetic
  source 1..21: mol_type = other DNA
ttttattctagttgaaagaat

SEQ ID NO: 3068 - DNA, 20 bp, synthetic construct
  misc_feature 1..20: note = Synthetic
  source 1..20: mol_type = other DNA
tttttccttttattctagtt

SEQ ID NO: 3069 - DNA, 21 bp, synthetic construct
  misc_feature 1..21: note = Synthetic
  source 1..21: mol_type = other DNA
tttttccttttattctagttg

SEQ ID NO: 3070-3999 - skipped (930 entries)

SEQ ID NO: 4000 - DNA, 20 bp, synthetic construct
  misc_feature 1..20: note = Synthetic
  source 1..20: mol_type = other DNA
atatgtgttacctacccttg

SEQ ID NO: 4001 - DNA, 21 bp, synthetic construct
  misc_feature 1..21: note = Synthetic
  source 1..21: mol_type = other DNA
tatatgtgttacctacccttg

SEQ ID NO: 4002 - DNA, 20 bp, synthetic construct
  misc_feature 1..20: note = Synthetic
  source 1..20: mol_type = other DNA
attttgttaactttttccca

SEQ ID NO: 4003 - DNA, 21 bp, synthetic construct
  misc_feature 1..21: note = Synthetic
  source 1..21: mol_type = other DNA
cattttgttaactttttccca

SEQ ID NO: 4004 - DNA, 20 bp, synthetic construct
  misc_feature 1..20: note = Synthetic
  source 1..20: mol_type = other DNA
ttttcccattggaaatcaag

SEQ ID NO: 4005 - DNA, 21 bp, synthetic construct
  misc_feature 1..21: note = Synthetic
  source 1..21: mol_type = other DNA
tttttcccattggaaatcaag

SEQ ID NO: 4006 - DNA, 20 bp, synthetic construct
  misc_feature 1..20: note = Synthetic
  source 1..20: mol_type = other DNA
tttcccattggaaatcaagc

SEQ ID NO: 4007 - DNA, 21 bp, synthetic construct
  misc_feature 1..21: note = Synthetic
  source 1..21: mol_type = other DNA
ttttcccattggaaatcaagc

SEQ ID NO: 4008 - DNA, 20 bp, synthetic construct
  misc_feature 1..20: note = Synthetic
  source 1..20: mol_type = other DNA
ctgtagcttcaccctttcca

SEQ ID NO: 4009 - DNA, 21 bp, synthetic construct
  misc_feature 1..21: note = Synthetic
  source 1..21: mol_type = other DNA
cctgtagcttcaccctttcca

SEQ ID NO: 4010 - DNA, 20 bp, synthetic construct
  misc_feature 1..20: note = Synthetic
  source 1..20: mol_type = other DNA
aatgtacaaggaccgacaag

SEQ ID NO: 4011 - DNA, 21 bp, synthetic construct
  misc_feature 1..21: note = Synthetic
  source 1..21: mol_type = other DNA
aatgtacaaggaccgacaagg

SEQ ID NO: 4012 - DNA, 20 bp, synthetic construct
  misc_feature 1..20: note = Synthetic
  source 1..20: mol_type = other DNA
acaaaatgtacaaggaccga

SEQ ID NO: 4013 - DNA, 21 bp, synthetic construct
  misc_feature 1..21: note = Synthetic
  source 1..21: mol_type = other DNA
acaaaatgtacaaggaccgac

SEQ ID NO: 4014 - DNA, 20 bp, synthetic construct
  misc_feature 1..20: note = Synthetic
  source 1..20: mol_type = other DNA
aacaaaatgtacaaggaccg

SEQ ID NO: 4015 - DNA, 21 bp, synthetic construct
  misc_feature 1..21: note = Synthetic
  source 1..21: mol_type = other DNA
aacaaaatgtacaaggaccga

SEQ ID NO: 4016 - DNA, 20 bp, synthetic construct
  misc_feature 1..20: note = Synthetic
  source 1..20: mol_type = other DNA
ggaaaaagttaacaaaatgt

SEQ ID NO: 4017 - DNA, 21 bp, synthetic construct
  misc_feature 1..21: note = Synthetic
  source 1..21: mol_type = other DNA
ggaaaaagttaacaaaatgta

SEQ ID NO: 4018 - DNA, 20 bp, synthetic construct
  misc_feature 1..20: note = Synthetic
  source 1..20: mol_type = other DNA
tctctcccagcttgatttcc

SEQ ID NO: 4019 - DNA, 21 bp, synthetic construct
  misc_feature 1..21: note = Synthetic
  source 1..21: mol_type = other DNA
tctctcccagcttgatttcca

SEQ ID NO: 4020 - DNA, 20 bp, synthetic construct
  misc_feature 1..20: note = Synthetic
  source 1..20: mol_type = other DNA
ctctctcccagcttgatttc

SEQ ID NO: 4021 - DNA, 21 bp, synthetic construct
  misc_feature 1..21: note = Synthetic
  source 1..21: mol_type = other DNA
ctctctcccagcttgatttcc

SEQ ID NO: 4022 - DNA, 20 bp, synthetic construct
  misc_feature 1..20: note = Synthetic
  source 1..20: mol_type = other DNA
gcctgtggaaagggtgaagc

SEQ ID NO: 4023 - DNA, 21 bp, synthetic construct
  misc_feature 1..21: note = Synthetic
  source 1..21: mol_type = other DNA
gcctgtggaaagggtgaagct

SEQ ID NO: 4024 - DNA, 20 bp, synthetic construct
  misc_feature 1..20: note = Synthetic
  source 1..20: mol_type = other DNA
gcaaagtgcaacgcctgtgg

SEQ ID NO: 4025 - DNA, 21 bp, synthetic construct
  misc_feature 1..21: note = Synthetic
  source 1..21: mol_type = other DNA
gcaaagtgcaacgcctgtgga

SEQ ID NO: 4026 - DNA, 20 bp, synthetic construct
  misc_feature 1..20: note = Synthetic
  source 1..20: mol_type = other DNA
tgcaaagtgcaacgcctgtg

SEQ ID NO: 4027 - DNA, 21 bp, synthetic construct
  misc_feature 1..21: note = Synthetic
  source 1..21: mol_type = other DNA
tgcaaagtgcaacgcctgtgg

SEQ ID NO: 4028 - DNA, 20 bp, synthetic construct
  misc_feature 1..20: note = Synthetic
  source 1..20: mol_type = other DNA
agcattgcaaagtgcaacgc

SEQ ID NO: 4029 - DNA, 21 bp, synthetic construct
  misc_feature 1..21: note = Synthetic
  source 1..21: mol_type = other DNA
agcattgcaaagtgcaacgcc

SEQ ID NO: 4030 - DNA, 20 bp, synthetic construct
  misc_feature 1..20: note = Synthetic
  source 1..20: mol_type = other DNA
atagtctacaacaaagctca

SEQ ID NO: 4031 - DNA, 21 bp, synthetic construct
  misc_feature 1..21: note = Synthetic
  source 1..21: mol_type = other DNA
atagtctacaacaaagctcag

SEQ ID NO: 4032 - DNA, 20 bp, synthetic construct
  misc_feature 1..20: note = Synthetic
  source 1..20: mol_type = other DNA
aaagatagtctacaacaaag

SEQ ID NO: 4033 - DNA, 21 bp, synthetic construct
  misc_feature 1..21: note = Synthetic
  source 1..21: mol_type = other DNA
aaagatagtctacaacaaagc

SEQ ID NO: 4034 - DNA, 20 bp, synthetic construct
  misc_feature 1..20: note = Synthetic
  source 1..20: mol_type = other DNA
tttagcatgttcccaattct

SEQ ID NO: 4035 - DNA, 21 bp, synthetic construct
  misc_feature 1..21: note = Synthetic
  source 1..21: mol_type = other DNA
atttagcatgttcccaattct

SEQ ID NO: 4036 - DNA, 20 bp, synthetic construct
  misc_feature 1..20: note = Synthetic
  source 1..20: mol_type = other DNA
cagatctgtcaaatcgcctg

SEQ ID NO: 4037 - DNA, 21 bp, synthetic construct
  misc_feature 1..21: note = Synthetic
  source 1..21: mol_type = other DNA
acagatctgtcaaatcgcctg

SEQ ID NO: 4038 - DNA, 20 bp, synthetic construct
  misc_feature 1..20: note = Synthetic
  source 1..20: mol_type = other DNA
tcgcctgcaggtaaaagcat

SEQ ID NO: 4039 - DNA, 21 bp, synthetic construct
  misc_feature 1..21: note = Synthetic
  source 1..21: mol_type = other DNA
atcgcctgcaggtaaaagcat

SEQ ID NO: 4040 - DNA, 20 bp, synthetic construct
  misc_feature 1..20: note = Synthetic
  source 1..20: mol_type = other DNA
tgctaaatacaaatggtatc

SEQ ID NO: 4041 - DNA, 21 bp, synthetic construct
  misc_feature 1..21: note = Synthetic
  source 1..21: mol_type = other DNA
tgctaaatacaaatggtatct

SEQ ID NO: 4042 - DNA, 20 bp, synthetic construct
  misc_feature 1..20: note = Synthetic
  source 1..20: mol_type = other DNA
attgggaacatgctaaatac

SEQ ID NO: 4043 - DNA, 21 bp, synthetic construct
  misc_feature 1..21: note = Synthetic
  source 1..21: mol_type = other DNA
attgggaacatgctaaataca

SEQ ID NO: 4044 - DNA, 20 bp, synthetic construct
  misc_feature 1..20: note = Synthetic
  source 1..20: mol_type = other DNA
aaagacacaaattcctgaga

SEQ ID NO: 4045 - DNA, 21 bp, synthetic construct
  misc_feature 1..21: note = Synthetic
  source 1..21: mol_type = other DNA
aaagacacaaattcctgagaa

SEQ ID NO: 4046 - DNA, 20 bp, synthetic construct
  misc_feature 1..20: note = Synthetic
  source 1..20: mol_type = other DNA
gaaagacacaaattcctgag

SEQ ID NO: 4047 - DNA, 21 bp, synthetic construct
  misc_feature 1..21: note = Synthetic
  source 1..21: mol_type = other DNA
gaaagacacaaattcctgaga

SEQ ID NO: 4048 - DNA, 20 bp, synthetic construct
  misc_feature 1..20: note = Synthetic
  source 1..20: mol_type = other DNA
atgatataaagatatttaat

SEQ ID NO: 4049 - DNA, 21 bp, synthetic construct
  misc_feature 1..21: note = Synthetic
  source 1..21: mol_type = other DNA
atgatataaagatatttaatc

SEQ ID NO: 4050 - DNA, 20 bp, synthetic construct
  misc_feature 1..20: note = Synthetic
  source 1..20: mol_type = other DNA
ttgacagatctgttgagaaa

SEQ ID NO: 4051 - DNA, 21 bp, synthetic construct
  misc_feature 1..21: note = Synthetic
  source 1..21: mol_type = other DNA
ttgacagatctgttgagaaat

SEQ ID NO: 4052 - DNA, 20 bp, synthetic construct
  misc_feature 1..20: note = Synthetic
  source 1..20: mol_type = other DNA
gatttgacagatctgttgag

SEQ ID NO: 4053 - DNA, 21 bp, synthetic construct
  misc_feature 1..21: note = Synthetic
  source 1..21: mol_type = other DNA
gatttgacagatctgttgaga

SEQ ID NO: 4054 - DNA, 20 bp, synthetic construct
  misc_feature 1..20: note = Synthetic
  source 1..20: mol_type = other DNA
ttgatccatatgcttttacc

SEQ ID NO: 4055 - DNA, 21 bp, synthetic construct
  misc_feature 1..21: note = Synthetic
  source 1..21: mol_type = other DNA
ttgatccatatgcttttacct

SEQ ID NO: 4056 - DNA, 20 bp, synthetic construct
  misc_feature 1..20: note = Synthetic
  source 1..20: mol_type = other DNA
acctcctgccaccgcagatt

SEQ ID NO: 4057 - DNA, 21 bp, synthetic construct
  misc_feature 1..21: note = Synthetic
  source 1..21: mol_type = other DNA
gacctcctgccaccgcagatt

SEQ ID NO: 4058 - DNA, 20 bp, synthetic construct
  misc_feature 1..20: note = Synthetic
  source 1..20: mol_type = other DNA
ccaatttttcctgtagaata

SEQ ID NO: 4059 - DNA, 21 bp, synthetic construct
  misc_feature 1..21: note = Synthetic
  source 1..21: mol_type = other DNA
cccaatttttcctgtagaata

SEQ ID NO: 4060 - DNA, 20 bp, synthetic construct
  misc_feature 1..20: note = Synthetic
  source 1..20: mol_type = other DNA
gaatactggcatctgttttt

SEQ ID NO: 4061 - DNA, 21 bp, synthetic construct
  misc_feature 1..21: note = Synthetic
  source 1..21: mol_type = other DNA
agaatactggcatctgttttt

SEQ ID NO: 4062 - DNA, 20 bp, synthetic construct
  misc_feature 1..20: note = Synthetic
  source 1..20: mol_type = other DNA
tgccgctgcccaatgccatc

SEQ ID NO: 4063 - DNA, 21 bp, synthetic construct
  misc_feature 1..21: note = Synthetic
  source 1..21: mol_type = other DNA
ttgccgctgcccaatgccatc

SEQ ID NO: 4064 - DNA, 20 bp, synthetic construct
  misc_feature 1..20: note = Synthetic
  source 1..20: mol_type = other DNA
agttcctgtaagataccaaa

SEQ ID NO: 4065 - DNA, 21 bp, synthetic construct
  misc_feature 1..21: note = Synthetic
  source 1..21: mol_type = other DNA
gagttcctgtaagataccaaa

SEQ ID NO: 4066 - DNA, 20 bp, synthetic construct
  misc_feature 1..20: note = Synthetic
  source 1..20: mol_type = other DNA
agaggtagggcgacagatct

SEQ ID NO: 4067 - DNA, 21 bp, synthetic construct
  misc_feature 1..21: note = Synthetic
  source 1..21: mol_type = other DNA
agaggtagggcgacagatcta

SEQ ID NO: 4068 - DNA, 20 bp, synthetic construct
  misc_feature 1..20: note = Synthetic
  source 1..20: mol_type = other DNA
ctgtcagacagaaaaaagag

SEQ ID NO: 4069 - DNA, 21 bp, synthetic construct
  misc_feature 1..21: note = Synthetic
  source 1..21: mol_type = other DNA
ctgtcagacagaaaaaagagg

SEQ ID NO: 4070 - DNA, 20 bp, synthetic construct
  misc_feature 1..20: note = Synthetic
  source 1..20: mol_type = other DNA
gctgtcagacagaaaaaaga

SEQ ID NO: 4071 - DNA, 21 bp, synthetic construct
  misc_feature 1..21: note = Synthetic
  source 1..21: mol_type = other DNA
gctgtcagacagaaaaaagag

SEQ ID NO: 4072 - DNA, 20 bp, synthetic construct
  misc_feature 1..20: note = Synthetic
  source 1..20: mol_type = other DNA
aacagctgtcagacagaaaa

SEQ ID NO: 4073 - DNA, 21 bp, synthetic construct
  misc_feature 1..21: note = Synthetic
  source 1..21: mol_type = other DNA
aacagctgtcagacagaaaaa

SEQ ID NO: 4074 - DNA, 20 bp, synthetic construct
  misc_feature 1..20: note = Synthetic
  source 1..20: mol_type = other DNA
aagcctgaatctgcggtggc

SEQ ID NO: 4075 - DNA, 21 bp, synthetic construct
  misc_feature 1..21: note = Synthetic
  source 1..21: mol_type = other DNA
aagcctgaatctgcggtggca

SEQ ID NO: 4076 - DNA, 20 bp, synthetic construct
  misc_feature 1..20: note = Synthetic
  source 1..20: mol_type = other DNA
gggaagcctgaatctgcggt

SEQ ID NO: 4077 - DNA, 21 bp, synthetic construct
  misc_feature 1..21: note = Synthetic
  source 1..21: mol_type = other DNA
gggaagcctgaatctgcggtg

SEQ ID NO: 4078 - DNA, 20 bp, synthetic construct
  misc_feature 1..20: note = Synthetic
  source 1..20: mol_type = other DNA
aattgggaagcctgaatctg

SEQ ID NO: 4079 - DNA, 21 bp, synthetic construct
  misc_feature 1..21: note = Synthetic
  source 1..21: mol_type = other DNA
aattgggaagcctgaatctgc

SEQ ID NO: 4080 - DNA, 20 bp, synthetic construct
  misc_feature 1..20: note = Synthetic
  source 1..20: mol_type = other DNA
aaaaattgggaagcctgaat

SEQ ID NO: 4081 - DNA, 21 bp, synthetic construct
  misc_feature 1..21: note = Synthetic
  source 1..21: mol_type = other DNA
aaaaattgggaagcctgaatc

SEQ ID NO: 4082 - DNA, 20 bp, synthetic construct
  misc_feature 1..20: note = Synthetic
  source 1..20: mol_type = other DNA
gccagtattctacaggaaaa

SEQ ID NO: 4083 - DNA, 21 bp, synthetic construct
  misc_feature 1..21: note = Synthetic
  source 1..21: mol_type = other DNA
gccagtattctacaggaaaaa

SEQ ID NO: 4084 - DNA, 20 bp, synthetic construct
  misc_feature 1..20: note = Synthetic
  source 1..20: mol_type = other DNA
tgccagtattctacaggaaa

SEQ ID NO: 4085 - DNA, 21 bp, synthetic construct
  misc_feature 1..21: note = Synthetic
  source 1..21: mol_type = other DNA
tgccagtattctacaggaaaa

SEQ ID NO: 4086 - DNA, 20 bp, synthetic construct
  misc_feature 1..20: note = Synthetic
  source 1..20: mol_type = other DNA
aaaaacagatgccagtattc

SEQ ID NO: 4087 - DNA, 21 bp, synthetic construct
  misc_feature 1..21: note = Synthetic
  source 1..21: mol_type = other DNA
aaaaacagatgccagtattct

SEQ ID NO: 4088 - DNA, 20 bp, synthetic construct
  misc_feature 1..20: note = Synthetic
  source 1..20: mol_type = other DNA
tgtcagaacattgaatgcaa

SEQ ID NO: 4089 - DNA, 21 bp, synthetic construct
  misc_feature 1..21: note = Synthetic
  source 1..21: mol_type = other DNA
tgtcagaacattgaatgcaac

SEQ ID NO: 4090 - DNA, 20 bp, synthetic construct
  misc_feature 1..20: note = Synthetic
  source 1..20: mol_type = other DNA
ttgtcagaacattgaatgca

SEQ ID NO: 4091 - DNA, 21 bp, synthetic construct
  misc_feature 1..21: note = Synthetic
  source 1..21: mol_type = other DNA
ttgtcagaacattgaatgcaa

SEQ ID NO: 4092 - DNA, 20 bp, synthetic construct
  misc_feature 1..20: note = Synthetic
  source 1..20: mol_type = other DNA
gttgtcagaacattgaatgc

SEQ ID NO: 4093 - DNA, 21 bp, synthetic construct
  misc_feature 1..21: note = Synthetic
  source 1..21: mol_type = other DNA
gttgtcagaacattgaatgca

SEQ ID NO: 4094 - DNA, 20 bp, synthetic construct
  misc_feature 1..20: note = Synthetic
  source 1..20: mol_type = other DNA
aactccaggatggcattggg

SEQ ID NO: 4095 - DNA, 21 bp, synthetic construct
  misc_feature 1..21: note = Synthetic
  source 1..21: mol_type = other DNA
aactccaggatggcattgggc

SEQ ID NO: 4096 - DNA, 20 bp, synthetic construct
  misc_feature 1..20: note = Synthetic
  source 1..20: mol_type = other DNA
tacaggaactccaggatggc

SEQ ID NO: 4097 - DNA, 21 bp, synthetic construct
  misc_feature 1..21: note = Synthetic
  source 1..21: mol_type = other DNA
tacaggaactccaggatggca

SEQ ID NO: 4098 - DNA, 20 bp, synthetic construct
  misc_feature 1..20: note = Synthetic
  source 1..20: mol_type = other DNA
ttacaggaactccaggatgg

SEQ ID NO: 4099 - DNA, 21 bp, synthetic construct
  misc_feature 1..21: note = Synthetic
  source 1..21: mol_type = other DNA
ttacaggaactccaggatggc

SEQ ID NO: 4100 - DNA, 20 bp, synthetic construct
  misc_feature 1..20: note = Synthetic
  source 1..20: mol_type = other DNA
ggtatcttacaggaactcca

SEQ ID NO: 4101 - DNA, 21 bp, synthetic construct
  misc_feature 1..21: note = Synthetic
  source 1..21: mol_type = other DNA
ggtatcttacaggaactccag

SEQ ID NO: 4102 - DNA, 20 bp, synthetic construct
  misc_feature 1..20: note = Synthetic
  source 1..20: mol_type = other DNA
ttttggtatcttacaggaac

SEQ ID NO: 4103 - DNA, 21 bp, synthetic construct
  misc_feature 1..21: note = Synthetic
  source 1..21: mol_type = other DNA
ttttggtatcttacaggaact

SEQ ID NO: 4104 - DNA, 20 bp, synthetic construct
  misc_feature 1..20: note = Synthetic
  source 1..20: mol_type = other DNA
gttttgcctttttggtatct

SEQ ID NO: 4105 - DNA, 21 bp, synthetic construct
  misc_feature 1..21: note = Synthetic
  source 1..21: mol_type = other DNA
gttttgcctttttggtatctt

SEQ ID NO: 4106 - DNA, 20 bp, synthetic construct
  misc_feature 1..20: note = Synthetic
  source 1..20: mol_type = other DNA
tcttttctcaaataaaaaga

SEQ ID NO: 4107 - DNA, 21 bp, synthetic construct
  misc_feature 1..21: note = Synthetic
  source 1..21: mol_type = other DNA
tcttttctcaaataaaaagac

SEQ ID NO: 4108 - DNA, 20 bp, synthetic construct
  misc_feature 1..20: note = Synthetic
  source 1..20: mol_type = other DNA
aatgggatccagtatactta

SEQ ID NO: 4109 - DNA, 21 bp, synthetic construct
  misc_feature 1..21: note = Synthetic
  source 1..21: mol_type = other DNA
gaatgggatccagtatactta

SEQ ID NO: 4110 - DNA, 20 bp, synthetic construct
  misc_feature 1..20: note = Synthetic
  source 1..20: mol_type = other DNA
tatacttacaggctccaata

SEQ ID NO: 4111 - DNA, 21 bp, synthetic construct
  misc_feature 1..21: note = Synthetic
  source 1..21: mol_type = other DNA
gtatacttacaggctccaata

SEQ ID NO: 4112 - DNA, 20 bp, synthetic construct
  misc_feature 1..20: note = Synthetic
  source 1..20: mol_type = other DNA
ggctccaatagtggtcagtc

SEQ ID NO: 4113 - DNA, 21 bp, synthetic construct
  misc_feature 1..21: note = Synthetic
  source 1..21: mol_type = other DNA
aggctccaatagtggtcagtc

SEQ ID NO: 4114 - DNA, 20 bp, synthetic construct
  misc_feature 1..20: note = Synthetic
  source 1..20: mol_type = other DNA
atagtggtcagtccaggagc

SEQ ID NO: 4115 - DNA, 21 bp, synthetic construct
  misc_feature 1..21: note = Synthetic
  source 1..21: mol_type = other DNA
aatagtggtcagtccaggagc

SEQ ID NO: 4116 - DNA, 20 bp, synthetic construct
  misc_feature 1..20: note = Synthetic
  source 1..20: mol_type = other DNA
ggtcagtccaggagctaggt

SEQ ID NO: 4117 - DNA, 21 bp, synthetic construct
  misc_feature 1..21: note = Synthetic
  source 1..21: mol_type = other DNA
tggtcagtccaggagctaggt

SEQ ID NO: 4118 - DNA, 20 bp, synthetic construct
  misc_feature 1..20: note = Synthetic
  source 1..20: mol_type = other DNA
gccctcagctcttgaagtaa

SEQ ID NO: 4119 - DNA, 21 bp, synthetic construct
  misc_feature 1..21: note = Synthetic
  source 1..21: mol_type = other DNA
tgccctcagctcttgaagtaa

SEQ ID NO: 4120 - DNA, 20 bp, synthetic construct
  misc_feature 1..20: note = Synthetic
  source 1..20: mol_type = other DNA
agtatactggatcccattct

SEQ ID NO: 4121 - DNA, 21 bp, synthetic construct
  misc_feature 1..21: note = Synthetic
  source 1..21: mol_type = other DNA
agtatactggatcccattctc

SEQ ID NO: 4122 - DNA, 20 bp, synthetic construct
  misc_feature 1..20: note = Synthetic
  source 1..20: mol_type = other DNA
actattggagcctgtaagta

SEQ ID NO: 4123 - DNA, 21 bp, synthetic construct
  misc_feature 1..21: note = Synthetic
  source 1..21: mol_type = other DNA
actattggagcctgtaagtat

SEQ ID NO: 4124 - DNA, 20 bp, synthetic construct
  misc_feature 1..20: note = Synthetic
  source 1..20: mol_type = other DNA
ctagctcctggactgaccac

SEQ ID NO: 4125 - DNA, 21 bp, synthetic construct
  misc_feature 1..21: note = Synthetic
  source 1..21: mol_type = other DNA
ctagctcctggactgaccact

SEQ ID NO: 4126 - DNA, 20 bp, synthetic construct
  misc_feature 1..20: note = Synthetic
  source 1..20: mol_type = other DNA
gcaaagcagcctgacctagc

SEQ ID NO: 4127 - DNA, 21 bp, synthetic construct
  misc_feature 1..21: note = Synthetic
  source 1..21: mol_type = other DNA
gcaaagcagcctgacctagct

SEQ ID NO: 4128 - DNA, 20 bp, synthetic construct
  misc_feature 1..20: note = Synthetic
  source 1..20: mol_type = other DNA
aaaccgtttacttcaagagc

SEQ ID NO: 4129 - DNA, 21 bp, synthetic construct
  misc_feature 1..21: note = Synthetic
  source 1..21: mol_type = other DNA
aaaccgtttacttcaagagct

SEQ ID NO: 4130 - DNA, 20 bp, synthetic construct
  misc_feature 1..20: note = Synthetic
  source 1..20: mol_type = other DNA
taaaccgtttacttcaagag

SEQ ID NO: 4131 - DNA, 21 bp, synthetic construct
  misc_feature 1..21: note = Synthetic
  source 1..21: mol_type = other DNA
taaaccgtttacttcaagagc

SEQ ID NO: 4132 - DNA, 20 bp, synthetic construct
  misc_feature 1..20: note = Synthetic
  source 1..20: mol_type = other DNA
agatctgagctctgagtgga

SEQ ID NO: 4133 - DNA, 21 bp, synthetic construct
  misc_feature 1..21: note = Synthetic
  source 1..21: mol_type = other DNA
agatctgagctctgagtggaa

SEQ ID NO: 4134 - DNA, 20 bp, synthetic construct
  misc_feature 1..20: note = Synthetic
  source 1..20: mol_type = other DNA
agaagatctgagctctgagt

SEQ ID NO: 4135 - DNA, 21 bp, synthetic construct
  misc_feature 1..21: note = Synthetic
  source 1..21: mol_type = other DNA
agaagatctgagctctgagtg

SEQ ID NO: 4136 - DNA, 20 bp, synthetic construct
  misc_feature 1..20: note = Synthetic
  source 1..20: mol_type = other DNA
agttagaagatctgagctct

SEQ ID NO: 4137 - DNA, 21 bp, synthetic construct
  misc_feature 1..21: note = Synthetic
  source 1..21: mol_type = other DNA
agttagaagatctgagctctg

SEQ ID NO: 4138 - DNA, 20 bp, synthetic construct
  misc_feature 1..20: note = Synthetic
  source 1..20: mol_type = other DNA
atgtgtatgcttttctgtta

SEQ ID NO: 4139 - DNA, 21 bp, synthetic construct
  misc_feature 1..21: note = Synthetic
  source 1..21: mol_type = other DNA
atgtgtatgcttttctgttaa

SEQ ID NO: 4140 - DNA, 20 bp, synthetic construct
  misc_feature 1..20: note = Synthetic
  source 1..20: mol_type = other DNA
atcatctcgttgatatcctc

SEQ ID NO: 4141 - DNA, 21 bp, synthetic construct
  misc_feature 1..21: note = Synthetic
  source 1..21: mol_type = other DNA
gatcatctcgttgatatcctc

SEQ ID NO: 4142 - DNA, 20 bp, synthetic construct
  misc_feature 1..20: note = Synthetic
  source 1..20: mol_type = other DNA
gatcaagcagagaaagccag

SEQ ID NO: 4143 - DNA, 21 bp, synthetic construct
  misc_feature 1..21: note = Synthetic
  source 1..21: mol_type = other DNA
tgatcaagcagagaaagccag

SEQ ID NO: 4144 - DNA, 20 bp, synthetic construct
  misc_feature 1..20: note = Synthetic
  source 1..20: mol_type = other DNA
tcggtaagttctgtccaagc

SEQ ID NO: 4145 - DNA, 21 bp, synthetic construct
  misc_feature 1..21: note = Synthetic
  source 1..21: mol_type = other DNA
gtcggtaagttctgtccaagc

SEQ ID NO: 4146 - DNA, 20 bp, synthetic construct
  misc_feature 1..20: note = Synthetic
  source 1..20: mol_type = other DNA
ccggttgaaatctgccagag

SEQ ID NO: 4147 - DNA, 21 bp, synthetic construct
  misc_feature 1..21: note = Synthetic
  source 1..21: mol_type = other DNA
cccggttgaaatctgccagag

SEQ ID NO: 4148 - DNA, 20 bp, synthetic construct
  misc_feature 1..20: note = Synthetic
  source 1..20: mol_type = other DNA
gagcaggtacctccaacatc

SEQ ID NO: 4149 - DNA, 21 bp, synthetic construct
  misc_feature 1..21: note = Synthetic
  source 1..21: mol_type = other DNA
agagcaggtacctccaacatc

SEQ ID NO: 4150 - DNA, 20 bp, synthetic construct
  misc_feature 1..20: note = Synthetic
  source 1..20: mol_type = other DNA
tacctccaacatcaaggaag

SEQ ID NO: 4151 - DNA, 21 bp, synthetic construct
  misc_feature 1..21: note = Synthetic
  source 1..21: mol_type = other DNA
gtacctccaacatcaaggaag

SEQ ID NO: 4152 - DNA, 20 bp, synthetic construct
  misc_feature 1..20: note = Synthetic
  source 1..20: mol_type = other DNA
aggaagatggcatttctagt

SEQ ID NO: 4153 - DNA, 21 bp, synthetic construct
  misc_feature 1..21: note = Synthetic
  source 1..21: mol_type = other DNA
aaggaagatggcatttctagt

SEQ ID NO: 4154 - DNA, 20 bp, synthetic construct
  misc_feature 1..20: note = Synthetic
  source 1..20: mol_type = other DNA
atggcatttctagtttggag

SEQ ID NO: 4155 - DNA, 21 bp, synthetic construct
  misc_feature 1..21: note = Synthetic
  source 1..21: mol_type = other DNA
gatggcatttctagtttggag

SEQ ID NO: 4156 - DNA, 20 bp, synthetic construct
  misc_feature 1..20: note = Synthetic
  source 1..20: mol_type = other DNA
ggcagtttccttagtaacca

SEQ ID NO: 4157 - DNA, 21 bp, synthetic construct
  misc_feature 1..21: note = Synthetic
  source 1..21: mol_type = other DNA
tggcagtttccttagtaacca

SEQ ID NO: 4158 - DNA, 20 bp, synthetic construct
  misc_feature 1..20: note = Synthetic
  source 1..20: mol_type = other DNA
caccagagtaacagtctgag

SEQ ID NO: 4159 - DNA, 21 bp, synthetic construct
  misc_feature 1..21: note = Synthetic
  source 1..21: mol_type = other DNA
tcaccagagtaacagtctgag

SEQ ID NO: 4160 - DNA, 20 bp, synthetic construct
  misc_feature 1..20: note = Synthetic
  source 1..20: mol_type = other DNA
tgagtaggagctaaaatatt

SEQ ID NO: 4161 - DNA, 21 bp, synthetic construct
  misc_feature 1..21: note = Synthetic
  source 1..21: mol_type = other DNA
ctgagtaggagctaaaatatt

SEQ ID NO: 4162 - DNA, 20 bp, synthetic construct
  misc_feature 1..20: note = Synthetic
  source 1..20: mol_type = other DNA
gagtaggagctaaaatattt

SEQ ID NO: 4163 - DNA, 21 bp, synthetic construct
  misc_feature 1..21: note = Synthetic
  source 1..21: mol_type = other DNA
tgagtaggagctaaaatattt

SEQ ID NO: 4164 - DNA, 20 bp, synthetic construct
  misc_feature 1..20: note = Synthetic
  source 1..20: mol_type = other DNA
atattttgggtttttgcaaa

SEQ ID NO: 4165 - DNA, 21 bp, synthetic construct
  misc_feature 1..21: note = Synthetic
  source 1..21: mol_type = other DNA
aatattttgggtttttgcaaa

SEQ ID NO: 4166 - DNA, 20 bp, synthetic construct
  misc_feature 1..20: note = Synthetic
  source 1..20: mol_type = other DNA
gtatgagaaaaaatgataaa

SEQ ID NO: 4167 - DNA, 21 bp, synthetic construct
  misc_feature 1..21: note = Synthetic
  source 1..21: mol_type = other DNA
gtatgagaaaaaatgataaaa

SEQ ID NO: 4168 - DNA, 20 bp, synthetic construct
  misc_feature 1..20: note = Synthetic
  source 1..20: mol_type = other DNA
caacgagatgatcatcaagc

SEQ ID NO: 4169 - DNA, 21 bp, synthetic construct
  misc_feature 1..21: note = Synthetic
  source 1..21: mol_type = other DNA
caacgagatgatcatcaagca

SEQ ID NO: 4170 - DNA, 20 bp, synthetic construct
  misc_feature 1..20: note = Synthetic
  source 1..20: mol_type = other DNA
gagggtgatggtgggtgacc

SEQ ID NO: 4171 - DNA, 21 bp, synthetic construct
  misc_feature 1..21: note = Synthetic
  source 1..21: mol_type = other DNA
gagggtgatggtgggtgacct

SEQ ID NO: 4172 - DNA, 20 bp, synthetic construct
  misc_feature 1..20: note = Synthetic
  source 1..20: mol_type = other DNA
ataaaatcacagagggtgat

SEQ ID NO: 4173 - DNA, 21 bp, synthetic construct
  misc_feature 1..21: note = Synthetic
  source 1..21: mol_type = other DNA
ataaaatcacagagggtgatg

SEQ ID NO: 4174 - DNA, 20 bp, synthetic construct
  misc_feature 1..20: note = Synthetic
  source 1..20: mol_type = other DNA
tataaaatcacagagggtga

SEQ ID NO: 4175 - DNA, 21 bp, synthetic construct
  misc_feature 1..21: note = Synthetic
  source 1..21: mol_type = other DNA
tataaaatcacagagggtgat

SEQ ID NO: 4176 - DNA, 20 bp, synthetic construct
  misc_feature 1..20: note = Synthetic
  source 1..20: mol_type = other DNA
agttataaaatcacagaggg

SEQ ID NO: 4177 - DNA, 21 bp, synthetic construct
  misc_feature 1..21: note = Synthetic
  source 1..21: mol_type = other DNA
agttataaaatcacagagggt

SEQ ID NO: 4178 - DNA, 20 bp, synthetic construct
  misc_feature 1..20: note = Synthetic
  source 1..20: mol_type = other DNA
tgatcaagttataaaatcac

SEQ ID NO: 4179 - DNA, 21 bp, synthetic construct
  misc_feature 1..21: note = Synthetic
  source 1..21: mol_type = other DNA
tgatcaagttataaaatcaca

SEQ ID NO: 4180 - DNA, 20 bp, synthetic construct
  misc_feature 1..20: note = Synthetic
  source 1..20: mol_type = other DNA
ttgatcaagttataaaatca

SEQ ID NO: 4181 - DNA, 21 bp, synthetic construct
  misc_feature 1..21: note = Synthetic
  source 1..21: mol_type = other DNA
ttgatcaagttataaaatcac

SEQ ID NO: 4182 - DNA, 20 bp, synthetic construct
  misc_feature 1..20: note = Synthetic
  source 1..20: mol_type = other DNA
gggcttggacagaacttacc

SEQ ID NO: 4183 - DNA, 21 bp, synthetic construct
  misc_feature 1..21: note = Synthetic
  source 1..21: mol_type = other DNA
gggcttggacagaacttaccg

SEQ ID NO: 4184 - DNA, 20 bp, synthetic construct
  misc_feature 1..20: note = Synthetic
  source 1..20: mol_type = other DNA
ctctggcagatttcaaccgg

SEQ ID NO: 4185 - DNA, 21 bp, synthetic construct
  misc_feature 1..21: note = Synthetic
  source 1..21: mol_type = other DNA
ctctggcagatttcaaccggg

SEQ ID NO: 4186 - DNA, 20 bp, synthetic construct
  misc_feature 1..20: note = Synthetic
  source 1..20: mol_type = other DNA
acctgctctggcagatttca

SEQ ID NO: 4187 - DNA, 21 bp, synthetic construct
  misc_feature 1..21: note = Synthetic
  source 1..21: mol_type = other DNA
acctgctctggcagatttcaa

SEQ ID NO: 4188 - DNA, 20 bp, synthetic construct
  misc_feature 1..20: note = Synthetic
  source 1..20: mol_type = other DNA
tacctgctctggcagatttc

SEQ ID NO: 4189 - DNA, 21 bp, synthetic construct
  misc_feature 1..21: note = Synthetic
  source 1..21: mol_type = other DNA
tacctgctctggcagatttca

SEQ ID NO: 4190 - DNA, 20 bp, synthetic construct
  misc_feature 1..20: note = Synthetic
  source 1..20: mol_type = other DNA
cttgatgttggaggtacctg

SEQ ID NO: 4191 - DNA, 21 bp, synthetic construct
  misc_feature 1..21: note = Synthetic
  source 1..21: mol_type = other DNA
cttgatgttggaggtacctgc

SEQ ID NO: 4192 - DNA, 20 bp, synthetic construct
  misc_feature 1..20: note = Synthetic
  source 1..20: mol_type = other DNA
aatgccatcttccttgatgt

SEQ ID NO: 4193 - DNA, 21 bp, synthetic construct
  misc_feature 1..21: note = Synthetic
  source 1..21: mol_type = other DNA
aatgccatcttccttgatgtt

SEQ ID NO: 4194 - DNA, 20 bp, synthetic construct
  misc_feature 1..20: note = Synthetic
  source 1..20: mol_type = other DNA
agaaatgccatcttccttga

SEQ ID NO: 4195 - DNA, 21 bp, synthetic construct
  misc_feature 1..21: note = Synthetic
  source 1..21: mol_type = other DNA
agaaatgccatcttccttgat

SEQ ID NO: 4196 - DNA, 20 bp, synthetic construct
  misc_feature 1..20: note = Synthetic
  source 1..20: mol_type = other DNA
ggtgacacaacctgtggtta

SEQ ID NO: 4197 - DNA, 21 bp, synthetic construct
  misc_feature 1..21: note = Synthetic
  source 1..21: mol_type = other DNA
ggtgacacaacctgtggttac

SEQ ID NO: 4198 - DNA, 20 bp, synthetic construct
  misc_feature 1..20: note = Synthetic
  source 1..20: mol_type = other DNA
tgttactctggtgacacaac

SEQ ID NO: 4199 - DNA, 21 bp, synthetic construct
  misc_feature 1..21: note = Synthetic
  source 1..21: mol_type = other DNA
tgttactctggtgacacaacc

SEQ ID NO: 4200 - DNA, 20 bp, synthetic construct
  misc_feature 1..20: note = Synthetic
  source 1..20: mol_type = other DNA
agctcctactcagactgtta

SEQ ID NO: 4201 - DNA, 21 bp, synthetic construct
  misc_feature 1..21: note = Synthetic
  source 1..21: mol_type = other DNA
agctcctactcagactgttac

SEQ ID NO: 4202 - DNA, 20 bp, synthetic construct
  misc_feature 1..20: note = Synthetic
  source 1..20: mol_type = other DNA
aggtatctttgatactaacc

SEQ ID NO: 4203 - DNA, 21 bp, synthetic construct
  misc_feature 1..21: note = Synthetic
  source 1..21: mol_type = other DNA
aaggtatctttgatactaacc

SEQ ID NO: 4204 - DNA, 20 bp, synthetic construct
  misc_feature 1..20: note = Synthetic
  source 1..20: mol_type = other DNA
ttggtttctgtgattttctt

SEQ ID NO: 4205 - DNA, 21 bp, synthetic construct
  misc_feature 1..21: note = Synthetic
  source 1..21: mol_type = other DNA
cttggtttctgtgattttctt

SEQ ID NO: 4206 - DNA, 20 bp, synthetic construct
  misc_feature 1..20: note = Synthetic
  source 1..20: mol_type = other DNA
tttggattgcatctactgta

SEQ ID NO: 4207 - DNA, 21 bp, synthetic construct
  misc_feature 1..21: note = Synthetic
  source 1..21: mol_type = other DNA
ttttggattgcatctactgta

SEQ ID NO: 4208 - DNA, 20 bp, synthetic construct
  misc_feature 1..20: note = Synthetic
  source 1..20: mol_type = other DNA
ttggattgcatctactgtat

SEQ ID NO: 4209 - DNA, 21 bp, synthetic construct
  misc_feature 1..21: note = Synthetic
  source 1..21: mol_type = other DNA
tttggattgcatctactgtat

SEQ ID NO: 4210 - DNA, 20 bp, synthetic construct
  misc_feature 1..20: note = Synthetic
  source 1..20: mol_type = other DNA
cctccttccatgactcaagc

SEQ ID NO: 4211 - DNA, 21 bp, synthetic construct
  misc_feature 1..21: note = Synthetic
  source 1..21: mol_type = other DNA
ccctccttccatgactcaagc

SEQ ID NO: 4212 - DNA, 20 bp, synthetic construct
  misc_feature 1..20: note = Synthetic
  source 1..20: mol_type = other DNA
tccatgactcaagcttggct

SEQ ID NO: 4213 - DNA, 21 bp, synthetic construct
  misc_feature 1..21: note = Synthetic
  source 1..21: mol_type = other DNA
ttccatgactcaagcttggct

SEQ ID NO: 4214 - DNA, 20 bp, synthetic construct
  misc_feature 1..20: note = Synthetic
  source 1..20: mol_type = other DNA
atttcattcaactgttgcct

SEQ ID NO: 4215 - DNA, 21 bp, synthetic construct
  misc_feature 1..21: note = Synthetic
  source 1..21: mol_type = other DNA
catttcattcaactgttgcct

SEQ ID NO: 4216 - DNA, 20 bp, synthetic construct
  misc_feature 1..20: note = Synthetic
  source 1..20: mol_type = other DNA
aactgttgcctccggttctg

SEQ ID NO: 4217 - DNA, 21 bp, synthetic construct
  misc_feature 1..21: note = Synthetic
  source 1..21: mol_type = other DNA
caactgttgcctccggttctg

SEQ ID NO: 4218 - DNA, 20 bp, synthetic construct
  misc_feature 1..20: note = Synthetic
  source 1..20: mol_type = other DNA
aattctttcaactagaataa

SEQ ID NO: 4219 - DNA, 21 bp, synthetic construct
  misc_feature 1..21: note = Synthetic
  source 1..21: mol_type = other DNA
gaattctttcaactagaataa

SEQ ID NO: 4220 - DNA, 20 bp, synthetic construct
  misc_feature 1..20: note = Synthetic
  source 1..20: mol_type = other DNA
ccaaaagaaaatcacagaaa

SEQ ID NO: 4221 - DNA, 21 bp, synthetic construct
  misc_feature 1..21: note = Synthetic
  source 1..21: mol_type = other DNA
ccaaaagaaaatcacagaaac

SEQ ID NO: 4222 - DNA, 20 bp, synthetic construct
  misc_feature 1..20: note = Synthetic
  source 1..20: mol_type = other DNA
gccaagcttgagtcatggaa

SEQ ID NO: 4223 - DNA, 21 bp, synthetic construct
  misc_feature 1..21: note = Synthetic
  source 1..21: mol_type = other DNA
gccaagcttgagtcatggaag

SEQ ID NO: 4224 - DNA, 20 bp, synthetic construct
  misc_feature 1..20: note = Synthetic
  source 1..20: mol_type = other DNA
agccaagcttgagtcatgga

SEQ ID NO: 4225 - DNA, 21 bp, synthetic construct
  misc_feature 1..21: note = Synthetic
  source 1..21: mol_type = other DNA
agccaagcttgagtcatggaa

SEQ ID NO: 4226 - DNA, 20 bp, synthetic construct
  misc_feature 1..20: note = Synthetic
  source 1..20: mol_type = other DNA
cagagccaagcttgagtcat

SEQ ID NO: 4227 - DNA, 21 bp, synthetic construct
  misc_feature 1..21: note = Synthetic
  source 1..21: mol_type = other DNA
cagagccaagcttgagtcatg

SEQ ID NO: 4228 - DNA, 20 bp, synthetic construct
  misc_feature 1..20: note = Synthetic
  source 1..20: mol_type = other DNA
aggccagagccaagcttgag

SEQ ID NO: 4229 - DNA, 21 bp, synthetic construct
  misc_feature 1..21: note = Synthetic
  source 1..21: mol_type = other DNA
aggccagagccaagcttgagt

SEQ ID NO: 4230 - DNA, 20 bp, synthetic construct
  misc_feature 1..20: note = Synthetic
  source 1..20: mol_type = other DNA
agaagctgagcaggtcttag

SEQ ID NO: 4231 - DNA, 21 bp, synthetic construct
  misc_feature 1..21: note = Synthetic
  source 1..21: mol_type = other DNA
agaagctgagcaggtcttagg

SEQ ID NO: 4232 - DNA, 20 bp, synthetic construct
  misc_feature 1..20: note = Synthetic
  source 1..20: mol_type = other DNA
aaggaagaagctgagcaggt

SEQ ID NO: 4233 - DNA, 21 bp, synthetic construct
  misc_feature 1..21: note = Synthetic
  source 1..21: mol_type = other DNA
aaggaagaagctgagcaggtc

SEQ ID NO: 4234 - DNA, 20 bp, synthetic construct
  misc_feature 1..20: note = Synthetic
  source 1..20: mol_type = other DNA
ggaagctaaggaagaagctg

SEQ ID NO: 4235 - DNA, 21 bp, synthetic construct
  misc_feature 1..21: note = Synthetic
  source 1..21: mol_type = other DNA
ggaagctaaggaagaagctga

SEQ ID NO: 4236 - DNA, 20 bp, synthetic construct
  misc_feature 1..20: note = Synthetic
  source 1..20: mol_type = other DNA
ttcaacacaatggctggaag

SEQ ID NO: 4237 - DNA, 21 bp, synthetic construct
  misc_feature 1..21: note = Synthetic
  source 1..21: mol_type = other DNA
ttcaacacaatggctggaagc

SEQ ID NO: 4238 - DNA, 20 bp, synthetic construct
  misc_feature 1..20: note = Synthetic
  source 1..20: mol_type = other DNA
gttaaaggattcaacacaat

SEQ ID NO: 4239 - DNA, 21 bp, synthetic construct
  misc_feature 1..21: note = Synthetic
  source 1..21: mol_type = other DNA
gttaaaggattcaacacaatg

SEQ ID NO: 4240 - DNA, 20 bp, synthetic construct
  misc_feature 1..20: note = Synthetic
  source 1..20: mol_type = other DNA
aaatgttaaaggattcaaca

SEQ ID NO: 4241 - DNA, 21 bp, synthetic construct
  misc_feature 1..21: note = Synthetic
  source 1..21: mol_type = other DNA
aaatgttaaaggattcaacac

SEQ ID NO: 4242 - DNA, 20 bp, synthetic construct
  misc_feature 1..20: note = Synthetic
  source 1..20: mol_type = other DNA
gcaacagttgaatgaaatgt

SEQ ID NO: 4243 - DNA, 21 bp, synthetic construct
  misc_feature 1..21: note = Synthetic
  source 1..21: mol_type = other DNA
gcaacagttgaatgaaatgtt

SEQ ID NO: 4244 - DNA, 20 bp, synthetic construct
  misc_feature 1..20: note = Synthetic
  source 1..20: mol_type = other DNA
tacaagaacaccttcagaac

SEQ ID NO: 4245 - DNA, 21 bp, synthetic construct
  misc_feature 1..21: note = Synthetic
  source 1..21: mol_type = other DNA
tacaagaacaccttcagaacc

SEQ ID NO: 4246 - DNA, 20 bp, synthetic construct
  misc_feature 1..20: note = Synthetic
  source 1..20: mol_type = other DNA
aagtacaagaacaccttcag

SEQ ID NO: 4247 - DNA, 21 bp, synthetic construct
  misc_feature 1..21: note = Synthetic
  source 1..21: mol_type = other DNA
aagtacaagaacaccttcaga

SEQ ID NO: 4248 - DNA, 20 bp, synthetic construct
  misc_feature 1..20: note = Synthetic
  source 1..20: mol_type = other DNA
agttgaaagaattcagaatc

SEQ ID NO: 4249 - DNA, 21 bp, synthetic construct
  misc_feature 1..21: note = Synthetic
  source 1..21: mol_type = other DNA
agttgaaagaattcagaatca

SEQ ID NO: 4250 - DNA, 20 bp, synthetic construct
  misc_feature 1..20: note = Synthetic
  source 1..20: mol_type = other DNA
tagttgaaagaattcagaat

SEQ ID NO: 4251 - DNA, 21 bp, synthetic construct
  misc_feature 1..21: note = Synthetic
  source 1..21: mol_type = other DNA
tagttgaaagaattcagaatc

SEQ ID NO: 4252-4299 - skipped (48 entries)

SEQ ID NO: 4300 - RNA, 21 nt, synthetic construct
  misc_feature 1..21: note = Synthetic
  source 1..21: mol_type = other RNA
cagttaaataccatgtttaat

SEQ ID NO: 4301 - RNA, 21 nt, synthetic construct
  misc_feature 1..21: note = Synthetic
  source 1..21: mol_type = other RNA
agttaaataccatgtttaatc

SEQ ID NO: 4302 - RNA, 21 nt, synthetic construct
  misc_feature 1..21: note = Synthetic
  source 1..21: mol_type = other RNA
gttaaataccatgtttaatca

SEQ ID NO: 4303 - RNA, 21 nt, synthetic construct
  misc_feature 1..21: note = Synthetic
  source 1..21: mol_type = other RNA
ttaaataccatgtttaatcat

SEQ ID NO: 4304 - RNA, 21 nt, synthetic construct
  misc_feature 1..21: note = Synthetic
  source 1..21: mol_type = other RNA
taaataccatgtttaatcatc

SEQ ID NO: 4305 - RNA, 21 nt, synthetic construct
  misc_feature 1..21: note = Synthetic
  source 1..21: mol_type = other RNA
aaataccatgtttaatcatcc

SEQ ID NO: 4306 - RNA, 21 nt, synthetic construct
  misc_feature 1..21: note = Synthetic
  source 1..21: mol_type = other RNA
aataccatgtttaatcatccc

SEQ ID NO: 4307 - RNA, 21 nt, synthetic construct
  misc_feature 1..21: note = Synthetic
  source 1..21: mol_type = other RNA
ataccatgtttaatcatccca

SEQ ID NO: 4308 - RNA, 21 nt, synthetic construct
  misc_feature 1..21: note = Synthetic
  source 1..21: mol_type = other RNA
taccatgtttaatcatcccac

SEQ ID NO: 4309 - RNA, 21 nt, synthetic construct
  misc_feature 1..21: note = Synthetic
  source 1..21: mol_type = other RNA
accatgtttaatcatcccaca

SEQ ID NO: 4310 - RNA, 21 nt, synthetic construct
  misc_feature 1..21: note = Synthetic
  source 1..21: mol_type = other RNA
ccatgtttaatcatcccacaa

SEQ ID NO: 4311 - RNA, 21 nt, synthetic construct
  misc_feature 1..21: note = Synthetic
  source 1..21: mol_type = other RNA
catgtttaatcatcccacaat

SEQ ID NO: 4312 - RNA, 21 nt, synthetic construct
  misc_feature 1..21: note = Synthetic
  source 1..21: mol_type = other RNA
atgtttaatcatcccacaatg

SEQ ID NO: 4313 - RNA, 21 nt, synthetic construct
  misc_feature 1..21: note = Synthetic
  source 1..21: mol_type = other RNA
tgtttaatcatcccacaatgg

SEQ ID NO: 4314 - RNA, 21 nt, synthetic construct
  misc_feature 1..21: note = Synthetic
  source 1..21: mol_type = other RNA
gtttaatcatcccacaatgga

SEQ ID NO: 4315 - RNA, 21 nt, synthetic construct
  misc_feature 1..21: note = Synthetic
  source 1..21: mol_type = other RNA
tttaatcatcccacaatggac

SEQ ID NO: 4316 - RNA, 21 nt, synthetic construct
  misc_feature 1..21: note = Synthetic
  source 1..21: mol_type = other RNA
ttaatcatcccacaatggaca

SEQ ID NO: 4317 - RNA, 21 nt, synthetic construct
  misc_feature 1..21: note = Synthetic
  source 1..21: mol_type = other RNA
taatcatcccacaatggacag

SEQ ID NO: 4318 - RNA, 21 nt, synthetic construct
  misc_feature 1..21: note = Synthetic
  source 1..21: mol_type = other RNA
aatcatcccacaatggacagt

SEQ ID NO: 4319 - RNA, 21 nt, synthetic construct
  misc_feature 1..21: note = Synthetic
  source 1..21: mol_type = other RNA
atcatcccacaatggacagta

SEQ ID NO: 4320 - RNA, 21 nt, synthetic construct
  misc_feature 1..21: note = Synthetic
  source 1..21: mol_type = other RNA
tcatcccacaatggacagtag

SEQ ID NO: 4321 - RNA, 21 nt, synthetic construct
  misc_feature 1..21: note = Synthetic
  source 1..21: mol_type = other RNA
catcccacaatggacagtagt

SEQ ID NO: 4322 - RNA, 21 nt, synthetic construct
  misc_feature 1..21: note = Synthetic
  source 1..21: mol_type = other RNA
atcccacaatggacagtagtg

SEQ ID NO: 4323 - RNA, 21 nt, synthetic construct
  misc_feature 1..21: note = Synthetic
  source 1..21: mol_type = other RNA
tcccacaatggacagtagtgc

SEQ ID NO: 4324 - RNA, 21 nt, synthetic construct
  misc_feature 1..21: note = Synthetic
  source 1..21: mol_type = other RNA
cccacaatggacagtagtgca

SEQ ID NO: 4325 - RNA, 21 nt, synthetic construct
  misc_feature 1..21: note = Synthetic
  source 1..21: mol_type = other RNA
ccacaatggacagtagtgcag

SEQ ID NO: 4326 - RNA, 21 nt, synthetic construct
  misc_feature 1..21: note = Synthetic
  source 1..21: mol_type = other RNA
cacaatggacagtagtgcagt

SEQ ID NO: 4327 - RNA, 21 nt, synthetic construct
  misc_feature 1..21: note = Synthetic
  source 1..21: mol_type = other RNA
acaatggacagtagtgcagta

SEQ ID NO: 4328 - RNA, 21 nt, synthetic construct
  misc_feature 1..21: note = Synthetic
  source 1..21: mol_type = other RNA
caatggacagtagtgcagtag

SEQ ID NO: 4329 - RNA, 21 nt, synthetic construct
  misc_feature 1..21: note = Synthetic
  source 1..21: mol_type = other RNA
aatggacagtagtgcagtagt

SEQ ID NO: 4330 - RNA, 21 nt, synthetic construct
  misc_feature 1..21: note = Synthetic
  source 1..21: mol_type = other RNA
atggacagtagtgcagtagta

SEQ ID NO: 4331 - RNA, 21 nt, synthetic construct
  misc_feature 1..21: note = Synthetic
  source 1..21: mol_type = other RNA
tggacagtagtgcagtagtag

SEQ ID NO: 4332 - RNA, 21 nt, synthetic construct
  misc_feature 1..21: note = Synthetic
  source 1..21: mol_type = other RNA
ggacagtagtgcagtagtaga

SEQ ID NO: 4333 - RNA, 21 nt, synthetic construct
  misc_feature 1..21: note = Synthetic
  source 1..21: mol_type = other RNA
gacagtagtgcagtagtagaa

SEQ ID NO: 4334 - RNA, 21 nt, synthetic construct
  misc_feature 1..21: note = Synthetic
  source 1..21: mol_type = other RNA
acagtagtgcagtagtagaaa

SEQ ID NO: 4335 - RNA, 21 nt, synthetic construct
  misc_feature 1..21: note = Synthetic
  source 1..21: mol_type = other RNA
cagtagtgcagtagtagaaat

SEQ ID NO: 4336 - RNA, 21 nt, synthetic construct
  misc_feature 1..21: note = Synthetic
  source 1..21: mol_type = other RNA
agtagtgcagtagtagaaatt

SEQ ID NO: 4337 - RNA, 21 nt, synthetic construct
  misc_feature 1..21: note = Synthetic
  source 1..21: mol_type = other RNA
gtagtgcagtagtagaaatta

SEQ ID NO: 4338 - RNA, 21 nt, synthetic construct
  misc_feature 1..21: note = Synthetic
  source 1..21: mol_type = other RNA
tagtgcagtagtagaaattat

SEQ ID NO: 4339 - RNA, 21 nt, synthetic construct
  misc_feature 1..21: note = Synthetic
  source 1..21: mol_type = other RNA
agtgcagtagtagaaattata

SEQ ID NO: 4340 - RNA, 21 nt, synthetic construct
  misc_feature 1..21: note = Synthetic
  source 1..21: mol_type = other RNA
gtgcagtagtagaaattataa

SEQ ID NO: 4341 - RNA, 21 nt, synthetic construct
  misc_feature 1..21: note = Synthetic
  source 1..21: mol_type = other RNA
tgcagtagtagaaattataag

SEQ ID NO: 4342 - RNA, 21 nt, synthetic construct
  misc_feature 1..21: note = Synthetic
  source 1..21: mol_type = other RNA
gcagtagtagaaattataagt

SEQ ID NO: 4343 - RNA, 21 nt, synthetic construct
  misc_feature 1..21: note = Synthetic
  source 1..21: mol_type = other RNA
cagtagtagaaattataagtg

SEQ ID NO: 4344 - RNA, 21 nt, synthetic construct
  misc_feature 1..21: note = Synthetic
  source 1..21: mol_type = other RNA
agtagtagaaattataagtgt

SEQ ID NO: 4345 - RNA, 21 nt, synthetic construct
  misc_feature 1..21: note = Synthetic
  source 1..21: mol_type = other RNA
gtagtagaaattataagtgtc

SEQ ID NO: 4346 - RNA, 21 nt, synthetic construct
  misc_feature 1..21: note = Synthetic
  source 1..21: mol_type = other RNA
tagtagaaattataagtgtct

SEQ ID NO: 4347 - RNA, 21 nt, synthetic construct
  misc_feature 1..21: note = Synthetic
  source 1..21: mol_type = other RNA
agtagaaattataagtgtctc

SEQ ID NO: 4348 - RNA, 21 nt, synthetic construct
  misc_feature 1..21: note = Synthetic
  source 1..21: mol_type = other RNA
gtagaaattataagtgtctct

SEQ ID NO: 4349 - RNA, 21 nt, synthetic construct
  misc_feature 1..21: note = Synthetic
  source 1..21: mol_type = other RNA
tagaaattataagtgtctctt

SEQ ID NO: 4350 - RNA, 21 nt, synthetic construct
  misc_feature 1..21: note = Synthetic
  source 1..21: mol_type = other RNA
agaaattataagtgtctcttt

SEQ ID NO: 4351 - RNA, 21 nt, synthetic construct
  misc_feature 1..21: note = Synthetic
  source 1..21: mol_type = other RNA
gaaattataagtgtctcttta

SEQ ID NO: 4352 - RNA, 21 nt, synthetic construct
  misc_feature 1..21: note = Synthetic
  source 1..21: mol_type = other RNA
aaattataagtgtctctttaa

SEQ ID NO: 4353 - RNA, 21 nt, synthetic construct
  misc_feature 1..21: note = Synthetic
  source 1..21: mol_type = other RNA
aattataagtgtctctttaaa

SEQ ID NO: 4354 - RNA, 21 nt, synthetic construct
  misc_feature 1..21: note = Synthetic
  source 1..21: mol_type = other RNA
attataagtgtctctttaaaa

SEQ ID NO: 4355 - RNA, 21 nt, synthetic construct
  misc_feature 1..21: note = Synthetic
  source 1..21: mol_type = other RNA
ttataagtgtctctttaaaaa

SEQ ID NO: 4356 - RNA, 21 nt, synthetic construct
  misc_feature 1..21: note = Synthetic
  source 1..21: mol_type = other RNA
tataagtgtctctttaaaaag

SEQ ID NO: 4357 - RNA, 21 nt, synthetic construct
  misc_feature 1..21: note = Synthetic
  source 1..21: mol_type = other RNA
ataagtgtctctttaaaaagt

SEQ ID NO: 4358 - RNA, 21 nt, synthetic construct
  misc_feature 1..21: note = Synthetic
  source 1..21: mol_type = other RNA
taagtgtctctttaaaaagtc

SEQ ID NO: 4359 - RNA, 21 nt, synthetic construct
  misc_feature 1..21: note = Synthetic
  source 1..21: mol_type = other RNA
aagtgtctctttaaaaagtca

SEQ ID NO: 4360 - RNA, 21 nt, synthetic construct
  misc_feature 1..21: note = Synthetic
  source 1..21: mol_type = other RNA
agtgtctctttaaaaagtcac

SEQ ID NO: 4361 - RNA, 21 nt, synthetic construct
  misc_feature 1..21: note = Synthetic
  source 1..21: mol_type = other RNA
gtgtctctttaaaaagtcact

SEQ ID NO: 4362 - RNA, 21 nt, synthetic construct
  misc_feature 1..21: note = Synthetic
  source 1..21: mol_type = other RNA
tgtctctttaaaaagtcactc

SEQ ID NO: 4363 - RNA, 21 nt, synthetic construct
  misc_feature 1..21: note = Synthetic
  source 1..21: mol_type = other RNA
gtctctttaaaaagtcactcc

SEQ ID NO: 4364 - RNA, 21 nt, synthetic construct
  misc_feature 1..21: note = Synthetic
  source 1..21: mol_type = other RNA
tctctttaaaaagtcactccc

SEQ ID NO: 4365 - RNA, 21 nt, synthetic construct
  misc_feature 1..21: note = Synthetic
  source 1..21: mol_type = other RNA
ctctttaaaaagtcactcccc

SEQ ID NO: 4366 - RNA, 21 nt, synthetic construct
  misc_feature 1..21: note = Synthetic
  source 1..21: mol_type = other RNA
tctttaaaaagtcactccccc

SEQ ID NO: 4367 - RNA, 21 nt, synthetic construct
  misc_feature 1..21: note = Synthetic
  source 1..21: mol_type = other RNA
ctttaaaaagtcactccccca

SEQ ID NO: 4368 - RNA, 21 nt, synthetic construct
  misc_feature 1..21: note = Synthetic
  source 1..21: mol_type = other RNA
tttaaaaagtcactcccccaa

SEQ ID NO: 4369 - RNA, 21 nt, synthetic construct
  misc_feature 1..21: note = Synthetic
  source 1..21: mol_type = other RNA
ttaaaaagtcactcccccaaa

SEQ ID NO: 4370 - RNA, 21 nt, synthetic construct
  misc_feature 1..21: note = Synthetic
  source 1..21: mol_type = other RNA
taaaaagtcactcccccaaag

SEQ ID NO: 4371 - RNA, 21 nt, synthetic construct
  misc_feature 1..21: note = Synthetic
  source 1..21: mol_type = other RNA
aaaaagtcactcccccaaagt

SEQ ID NO: 4372 - RNA, 21 nt, synthetic construct
  misc_feature 1..21: note = Synthetic
  source 1..21: mol_type = other RNA
aaaagtcactcccccaaagtt

SEQ ID NO: 4373 - RNA, 21 nt, synthetic construct
  misc_feature 1..21: note = Synthetic
  source 1..21: mol_type = other RNA
aaagtcactcccccaaagttt

SEQ ID NO: 4374 - RNA, 21 nt, synthetic construct
  misc_feature 1..21: note = Synthetic
  source 1..21: mol_type = other RNA
aagtcactcccccaaagtttc

SEQ ID NO: 4375 - RNA, 21 nt, synthetic construct
  misc_feature 1..21: note = Synthetic
  source 1..21: mol_type = other RNA
agtcactcccccaaagtttcc

SEQ ID NO: 4376 - RNA, 21 nt, synthetic construct
  misc_feature 1..21: note = Synthetic
  source 1..21: mol_type = other RNA
gtcactcccccaaagtttcca

SEQ ID NO: 4377 - RNA, 21 nt, synthetic construct
  misc_feature 1..21: note = Synthetic
  source 1..21: mol_type = other RNA
tcactcccccaaagtttccat

SEQ ID NO: 4378 - RNA, 21 nt, synthetic construct
  misc_feature 1..21: note = Synthetic
  source 1..21: mol_type = other RNA
cactcccccaaagtttccatt

SEQ ID NO: 4379 - RNA, 21 nt, synthetic construct
  misc_feature 1..21: note = Synthetic
  source 1..21: mol_type = other RNA
actcccccaaagtttccattc

SEQ ID NO: 4380 - RNA, 21 nt, synthetic construct
  misc_feature 1..21: note = Synthetic
  source 1..21: mol_type = other RNA
ctcccccaaagtttccattcc

SEQ ID NO: 4381 - RNA, 21 nt, synthetic construct
  misc_feature 1..21: note = Synthetic
  source 1..21: mol_type = other RNA
tcccccaaagtttccattccc

SEQ ID NO: 4382 - RNA, 21 nt, synthetic construct
  misc_feature 1..21: note = Synthetic
  source 1..21: mol_type = other RNA
cccccaaagtttccattcccc

SEQ ID NO: 4383 - RNA, 21 nt, synthetic construct
  misc_feature 1..21: note = Synthetic
  source 1..21: mol_type = other RNA
ccccaaagtttccattcccca

SEQ ID NO: 4384 - RNA, 21 nt, synthetic construct
  misc_feature 1..21: note = Synthetic
  source 1..21: mol_type = other RNA
cccaaagtttccattccccaa

SEQ ID NO: 4385 - RNA, 21 nt, synthetic construct
  misc_feature 1..21: note = Synthetic
  source 1..21: mol_type = other RNA
ccaaagtttccattccccaat

SEQ ID NO: 4386 - RNA, 21 nt, synthetic construct
  misc_feature 1..21: note = Synthetic
  source 1..21: mol_type = other RNA
caaagtttccattccccaata

SEQ ID NO: 4387 - RNA, 21 nt, synthetic construct
  misc_feature 1..21: note = Synthetic
  source 1..21: mol_type = other RNA
aaagtttccattccccaatac

SEQ ID NO: 4388 - RNA, 21 nt, synthetic construct
  misc_feature 1..21: note = Synthetic
  source 1..21: mol_type = other RNA
aagtttccattccccaatacc

SEQ ID NO: 4389 - RNA, 21 nt, synthetic construct
  misc_feature 1..21: note = Synthetic
  source 1..21: mol_type = other RNA
agtttccattccccaataccc

SEQ ID NO: 4390 - RNA, 21 nt, synthetic construct
  misc_feature 1..21: note = Synthetic
  source 1..21: mol_type = other RNA
gtttccattccccaataccca

SEQ ID NO: 4391 - RNA, 21 nt, synthetic construct
  misc_feature 1..21: note = Synthetic
  source 1..21: mol_type = other RNA
tttccattccccaatacccag

SEQ ID NO: 4392 - RNA, 21 nt, synthetic construct
  misc_feature 1..21: note = Synthetic
  source 1..21: mol_type = other RNA
ttccattccccaatacccaga

SEQ ID NO: 4393 - RNA, 21 nt, synthetic construct
  misc_feature 1..21: note = Synthetic
  source 1..21: mol_type = other RNA
tccattccccaatacccagat

SEQ ID NO: 4394 - RNA, 21 nt, synthetic construct
  misc_feature 1..21: note = Synthetic
  source 1..21: mol_type = other RNA
ccattccccaatacccagata

SEQ ID NO: 4395 - RNA, 21 nt, synthetic construct
  misc_feature 1..21: note = Synthetic
  source 1..21: mol_type = other RNA
cattccccaatacccagataa

SEQ ID NO: 4396 - RNA, 21 nt, synthetic construct
  misc_feature 1..21: note = Synthetic
  source 1..21: mol_type = other RNA
attccccaatacccagataac

SEQ ID NO: 4397 - RNA, 21 nt, synthetic construct
  misc_feature 1..21: note = Synthetic
  source 1..21: mol_type = other RNA
ttccccaatacccagataacc

SEQ ID NO: 4398 - RNA, 21 nt, synthetic construct
  misc_feature 1..21: note = Synthetic
  source 1..21: mol_type = other RNA
tccccaatacccagataacca

SEQ ID NO: 4399 - RNA, 21 nt, synthetic construct
  misc_feature 1..21: note = Synthetic
  source 1..21: mol_type = other RNA
ccccaatacccagataaccat

SEQ ID NO: 4400 - RNA, 21 nt, synthetic construct
  misc_feature 1..21: note = Synthetic
  source 1..21: mol_type = other RNA
cccaatacccagataaccatg

SEQ ID NO: 4401 - RNA, 21 nt, synthetic construct
  misc_feature 1..21: note = Synthetic
  source 1..21: mol_type = other RNA
ccaatacccagataaccatgg

SEQ ID NO: 4402 - RNA, 21 nt, synthetic construct
  misc_feature 1..21: note = Synthetic
  source 1..21: mol_type = other RNA
caatacccagataaccatggt

SEQ ID NO: 4403 - RNA, 21 nt, synthetic construct
  misc_feature 1..21: note = Synthetic
  source 1..21: mol_type = other RNA
aatacccagataaccatggtg

SEQ ID NO: 4404 - RNA, 21 nt, synthetic construct
  misc_feature 1..21: note = Synthetic
  source 1..21: mol_type = other RNA
atacccagataaccatggtgg

SEQ ID NO: 4405 - RNA, 21 nt, synthetic construct
  misc_feature 1..21: note = Synthetic
  source 1..21: mol_type = other RNA
tacccagataaccatggtgga

SEQ ID NO: 4406 - RNA, 21 nt, synthetic construct
  misc_feature 1..21: note = Synthetic
  source 1..21: mol_type = other RNA
acccagataaccatggtggaa

SEQ ID NO: 4407 - RNA, 21 nt, synthetic construct
  misc_feature 1..21: note = Synthetic
  source 1..21: mol_type = other RNA
cccagataaccatggtggaac

SEQ ID NO: 4408 - RNA, 21 nt, synthetic construct
  misc_feature 1..21: note = Synthetic
  source 1..21: mol_type = other RNA
ccagataaccatggtggaaca

SEQ ID NO: 4409 - RNA, 21 nt, synthetic construct
  misc_feature 1..21: note = Synthetic
  source 1..21: mol_type = other RNA
cagataaccatggtggaacag

SEQ ID NO: 4410 - RNA, 21 nt, synthetic construct
  misc_feature 1..21: note = Synthetic
  source 1..21: mol_type = other RNA
agataaccatggtggaacagg

SEQ ID NO: 4411 - RNA, 21 nt, synthetic construct
  misc_feature 1..21: note = Synthetic
  source 1..21: mol_type = other RNA
gataaccatggtggaacaggg

SEQ ID NO: 4412 - RNA, 21 nt, synthetic construct
  misc_feature 1..21: note = Synthetic
  source 1..21: mol_type = other RNA
ataaccatggtggaacagggc

SEQ ID NO: 4413 - RNA, 21 nt, synthetic construct
  misc_feature 1..21: note = Synthetic
  source 1..21: mol_type = other RNA
taaccatggtggaacagggcc

SEQ ID NO: 4414 - RNA, 21 nt, synthetic construct
  misc_feature 1..21: note = Synthetic
  source 1..21: mol_type = other RNA
aaccatggtggaacagggcca

SEQ ID NO: 4415 - RNA, 21 nt, synthetic construct
  misc_feature 1..21: note = Synthetic
  source 1..21: mol_type = other RNA
accatggtggaacagggccag

SEQ ID NO: 4416 - RNA, 21 nt, synthetic construct
  misc_feature 1..21: note = Synthetic
  source 1..21: mol_type = other RNA
ccatggtggaacagggccagg

SEQ ID NO: 4417 - RNA, 21 nt, synthetic construct
  misc_feature 1..21: note = Synthetic
  source 1..21: mol_type = other RNA
catggtggaacagggccaggg

SEQ ID NO: 4418 - RNA, 21 nt, synthetic construct
  misc_feature 1..21: note = Synthetic
  source 1..21: mol_type = other RNA
atggtggaacagggccagggt

SEQ ID NO: 4419 - RNA, 21 nt, synthetic construct
  misc_feature 1..21: note = Synthetic
  source 1..21: mol_type = other RNA
tggtggaacagggccagggtg

SEQ ID NO: 4420 - RNA, 21 nt, synthetic construct
  misc_feature 1..21: note = Synthetic
  source 1..21: mol_type = other RNA
ggtggaacagggccagggtga

SEQ ID NO: 4421 - RNA, 21 nt, synthetic construct
  misc_feature 1..21: note = Synthetic
  source 1..21: mol_type = other RNA
gtggaacagggccagggtgag

SEQ ID NO: 4422 - RNA, 21 nt, synthetic construct
  misc_feature 1..21: note = Synthetic
  source 1..21: mol_type = other RNA
tggaacagggccagggtgagg

SEQ ID NO: 4423 - RNA, 21 nt, synthetic construct
  misc_feature 1..21: note = Synthetic
  source 1..21: mol_type = other RNA
ggaacagggccagggtgaggg

SEQ ID NO: 4424 - RNA, 21 nt, synthetic construct
  misc_feature 1..21: note = Synthetic
  source 1..21: mol_type = other RNA
gaacagggccagggtgagggg

SEQ ID NO: 4425 - RNA, 21 nt, synthetic construct
  misc_feature 1..21: note = Synthetic
  source 1..21: mol_type = other RNA
aacagggccagggtgaggggg

SEQ ID NO: 4426 - RNA, 21 nt, synthetic construct
  misc_feature 1..21: note = Synthetic
  source 1..21: mol_type = other RNA
acagggccagggtgaggggga

SEQ ID NO: 4427 - RNA, 21 nt, synthetic construct
  misc_feature 1..21: note = Synthetic
  source 1..21: mol_type = other RNA
cagggccagggtgagggggac

SEQ ID NO: 4428 - RNA, 21 nt, synthetic construct
  misc_feature 1..21: note = Synthetic
  source 1..21: mol_type = other RNA
agggccagggtgagggggact

SEQ ID NO: 4429 - RNA, 21 nt, synthetic construct
  misc_feature 1..21: note = Synthetic
  source 1..21: mol_type = other RNA
gggccagggtgagggggactc

SEQ ID NO: 4430 - RNA, 21 nt, synthetic construct
  misc_feature 1..21: note = Synthetic
  source 1..21: mol_type = other RNA
ggccagggtgagggggactca

SEQ ID NO: 4431 - RNA, 21 nt, synthetic construct
  misc_feature 1..21: note = Synthetic
  source 1..21: mol_type = other RNA
gccagggtgagggggactcag

SEQ ID NO: 4432 - RNA, 21 nt, synthetic construct
  misc_feature 1..21: note = Synthetic
  source 1..21: mol_type = other RNA
ccagggtgagggggactcagg

SEQ ID NO: 4433 - RNA, 21 nt, synthetic construct
  misc_feature 1..21: note = Synthetic
  source 1..21: mol_type = other RNA
cagggtgagggggactcagga

SEQ ID NO: 4434 - RNA, 21 nt, synthetic construct
  misc_feature 1..21: note = Synthetic
  source 1..21: mol_type = other RNA
agggtgagggggactcaggaa

SEQ ID NO: 4435 - RNA, 21 nt, synthetic construct
  misc_feature 1..21: note = Synthetic
  source 1..21: mol_type = other RNA
gggtgagggggactcaggaag

SEQ ID NO: 4436 - RNA, 21 nt, synthetic construct
  misc_feature 1..21: note = Synthetic
  source 1..21: mol_type = other RNA
ggtgagggggactcaggaagt

SEQ ID NO: 4437 - RNA, 21 nt, synthetic construct
  misc_feature 1..21: note = Synthetic
  source 1..21: mol_type = other RNA
gtgagggggactcaggaagtc

SEQ ID NO: 4438 - RNA, 21 nt, synthetic construct
  misc_feature 1..21: note = Synthetic
  source 1..21: mol_type = other RNA
tgagggggactcaggaagtct

SEQ ID NO: 4439 - RNA, 21 nt, synthetic construct
  misc_feature 1..21: note = Synthetic
  source 1..21: mol_type = other RNA
gagggggactcaggaagtctt

SEQ ID NO: 4440 - RNA, 21 nt, synthetic construct
  misc_feature 1..21: note = Synthetic
  source 1..21: mol_type = other RNA
agggggactcaggaagtcttg

SEQ ID NO: 4441 - RNA, 21 nt, synthetic construct
  misc_feature 1..21: note = Synthetic
  source 1..21: mol_type = other RNA
gggggactcaggaagtcttgg

SEQ ID NO: 4442 - RNA, 21 nt, synthetic construct
  misc_feature 1..21: note = Synthetic
  source 1..21: mol_type = other RNA
ggggactcaggaagtcttggt

SEQ ID NO: 4443 - RNA, 21 nt, synthetic construct
  misc_feature 1..21: note = Synthetic
  source 1..21: mol_type = other RNA
gggactcaggaagtcttggtt

SEQ ID NO: 4444 - RNA, 21 nt, synthetic construct
  misc_feature 1..21: note = Synthetic
  source 1..21: mol_type = other RNA
ggactcaggaagtcttggttc

SEQ ID NO: 4445 - RNA, 21 nt, synthetic construct
  misc_feature 1..21: note = Synthetic
  source 1..21: mol_type = other RNA
gactcaggaagtcttggttcc

SEQ ID NO: 4446 - RNA, 21 nt, synthetic construct
  misc_feature 1..21: note = Synthetic
  source 1..21: mol_type = other RNA
actcaggaagtcttggttcca

SEQ ID NO: 4447 - RNA, 21 nt, synthetic construct
  misc_feature 1..21: note = Synthetic
  source 1..21: mol_type = other RNA
ctcaggaagtcttggttccaa

SEQ ID NO: 4448 - RNA, 21 nt, synthetic construct
  misc_feature 1..21: note = Synthetic
  source 1..21: mol_type = other RNA
tcaggaagtcttggttccaag

SEQ ID NO: 4449 - RNA, 21 nt, synthetic construct
  misc_feature 1..21: note = Synthetic
  source 1..21: mol_type = other RNA
caggaagtcttggttccaagg

SEQ ID NO: 4450 - RNA, 21 nt, synthetic construct
  misc_feature 1..21: note = Synthetic
  source 1..21: mol_type = other RNA
aggaagtcttggttccaagga

SEQ ID NO: 4451 - RNA, 21 nt, synthetic construct
  misc_feature 1..21: note = Synthetic
  source 1..21: mol_type = other RNA
ggaagtcttggttccaaggag

SEQ ID NO: 4452 - RNA, 21 nt, synthetic construct
  misc_feature 1..21: note = Synthetic
  source 1..21: mol_type = other RNA
gaagtcttggttccaaggaga

SEQ ID NO: 4453 - RNA, 21 nt, synthetic construct
  misc_feature 1..21: note = Synthetic
  source 1..21: mol_type = other RNA
aagtcttggttccaaggagat

SEQ ID NO: 4454 - RNA, 21 nt, synthetic construct
  misc_feature 1..21: note = Synthetic
  source 1..21: mol_type = other RNA
agtcttggttccaaggagatg

SEQ ID NO: 4455 - RNA, 21 nt, synthetic construct
  misc_feature 1..21: note = Synthetic
  source 1..21: mol_type = other RNA
gtcttggttccaaggagatga

SEQ ID NO: 4456 - RNA, 21 nt, synthetic construct
  misc_feature 1..21: note = Synthetic
  source 1..21: mol_type = other RNA
tcttggttccaaggagatgaa

SEQ ID NO: 4457 - RNA, 21 nt, synthetic construct
  misc_feature 1..21: note = Synthetic
  source 1..21: mol_type = other RNA
cttggttccaaggagatgaaa

SEQ ID NO: 4458 - RNA, 21 nt, synthetic construct
  misc_feature 1..21: note = Synthetic
  source 1..21: mol_type = other RNA
ttggttccaaggagatgaaag

SEQ ID NO: 4459 - RNA, 21 nt, synthetic construct
  misc_feature 1..21: note = Synthetic
  source 1..21: mol_type = other RNA
tggttccaaggagatgaaagt

SEQ ID NO: 4460 - RNA, 21 nt, synthetic construct
  misc_feature 1..21: note = Synthetic
  source 1..21: mol_type = other RNA
ggttccaaggagatgaaagtc

SEQ ID NO: 4461 - RNA, 21 nt, synthetic construct
  misc_feature 1..21: note = Synthetic
  source 1..21: mol_type = other RNA
gttccaaggagatgaaagtct

SEQ ID NO: 4462 - RNA, 21 nt, synthetic construct
  misc_feature 1..21: note = Synthetic
  source 1..21: mol_type = other RNA
ttccaaggagatgaaagtctt

SEQ ID NO: 4463 - RNA, 21 nt, synthetic construct
  misc_feature 1..21: note = Synthetic
  source 1..21: mol_type = other RNA
tccaaggagatgaaagtcttt

SEQ ID NO: 4464 - RNA, 21 nt, synthetic construct
  misc_feature 1..21: note = Synthetic
  source 1..21: mol_type = other RNA
ccaaggagatgaaagtctttc

SEQ ID NO: 4465 - RNA, 21 nt, synthetic construct
  misc_feature 1..21: note = Synthetic
  source 1..21: mol_type = other RNA
caaggagatgaaagtctttcc

SEQ ID NO: 4466 - RNA, 21 nt, synthetic construct
  misc_feature 1..21: note = Synthetic
  source 1..21: mol_type = other RNA
aaggagatgaaagtctttcca

SEQ ID NO: 4467 - RNA, 21 nt, synthetic construct
  misc_feature 1..21: note = Synthetic
  source 1..21: mol_type = other RNA
aggagatgaaagtctttccaa

SEQ ID NO: 4468 - RNA, 21 nt, synthetic construct
  misc_feature 1..21: note = Synthetic
  source 1..21: mol_type = other RNA
ggagatgaaagtctttccaag

SEQ ID NO: 4469 - RNA, 21 nt, synthetic construct
  misc_feature 1..21: note = Synthetic
  source 1..21: mol_type = other RNA
gagatgaaagtctttccaagt

SEQ ID NO: 4470 - RNA, 21 nt, synthetic construct
  misc_feature 1..21: note = Synthetic
  source 1..21: mol_type = other RNA
agatgaaagtctttccaagtc

SEQ ID NO: 4471 - RNA, 21 nt, synthetic construct
  misc_feature 1..21: note = Synthetic
  source 1..21: mol_type = other RNA
gatgaaagtctttccaagtca

SEQ ID NO: 4472 - RNA, 21 nt, synthetic construct
  misc_feature 1..21: note = Synthetic
  source 1..21: mol_type = other RNA
atgaaagtctttccaagtcaa

SEQ ID NO: 4473 - RNA, 21 nt, synthetic construct
  misc_feature 1..21: note = Synthetic
  source 1..21: mol_type = other RNA
tgaaagtctttccaagtcaaa

SEQ ID NO: 4474 - RNA, 21 nt, synthetic construct
  misc_feature 1..21: note = Synthetic
  source 1..21: mol_type = other RNA
gaaagtctttccaagtcaaat

SEQ ID NO: 4475 - RNA, 21 nt, synthetic construct
  misc_feature 1..21: note = Synthetic
  source 1..21: mol_type = other RNA
aaagtctttccaagtcaaatt

SEQ ID NO: 4476 - RNA, 21 nt, synthetic construct
  misc_feature 1..21: note = Synthetic
  source 1..21: mol_type = other RNA
aagtctttccaagtcaaattt

SEQ ID NO: 4477 - RNA, 21 nt, synthetic construct
  misc_feature 1..21: note = Synthetic
  source 1..21: mol_type = other RNA
agtctttccaagtcaaatttg

SEQ ID NO: 4478 - RNA, 21 nt, synthetic construct
  misc_feature 1..21: note = Synthetic
  source 1..21: mol_type = other RNA
gtctttccaagtcaaatttgc

SEQ ID NO: 4479 - RNA, 21 nt, synthetic construct
  misc_feature 1..21: note = Synthetic
  source 1..21: mol_type = other RNA
tctttccaagtcaaatttgcc

SEQ ID NO: 4480 - RNA, 21 nt, synthetic construct
  misc_feature 1..21: note = Synthetic
  source 1..21: mol_type = other RNA
ctttccaagtcaaatttgcct

SEQ ID NO: 4481 - RNA, 21 nt, synthetic construct
  misc_feature 1..21: note = Synthetic
  source 1..21: mol_type = other RNA
tttccaagtcaaatttgcctt

SEQ ID NO: 4482 - RNA, 21 nt, synthetic construct
  misc_feature 1..21: note = Synthetic
  source 1..21: mol_type = other RNA
ttccaagtcaaatttgccttg

SEQ ID NO: 4483 - RNA, 21 nt, synthetic construct
  misc_feature 1..21: note = Synthetic
  source 1..21: mol_type = other RNA
tccaagtcaaatttgccttgt

SEQ ID NO: 4484 - RNA, 21 nt, synthetic construct
  misc_feature 1..21: note = Synthetic
  source 1..21: mol_type = other RNA
ccaagtcaaatttgccttgtg

SEQ ID NO: 4485 - RNA, 21 nt, synthetic construct
  misc_feature 1..21: note = Synthetic
  source 1..21: mol_type = other RNA
caagtcaaatttgccttgtga

SEQ ID NO: 4486 - RNA, 21 nt, synthetic construct
  misc_feature 1..21: note = Synthetic
  source 1..21: mol_type = other RNA
aagtcaaatttgccttgtgag

SEQ ID NO: 4487 - RNA, 21 nt, synthetic construct
  misc_feature 1..21: note = Synthetic
  source 1..21: mol_type = other RNA
agtcaaatttgccttgtgagc

SEQ ID NO: 4488 - RNA, 21 nt, synthetic construct
  misc_feature 1..21: note = Synthetic
  source 1..21: mol_type = other RNA
gtcaaatttgccttgtgagca

SEQ ID NO: 4489 - RNA, 21 nt, synthetic construct
  misc_feature 1..21: note = Synthetic
  source 1..21: mol_type = other RNA
tcaaatttgccttgtgagcag

SEQ ID NO: 4490 - RNA, 21 nt, synthetic construct
  misc_feature 1..21: note = Synthetic
  source 1..21: mol_type = other RNA
caaatttgccttgtgagcagc

SEQ ID NO: 4491 - RNA, 21 nt, synthetic construct
  misc_feature 1..21: note = Synthetic
  source 1..21: mol_type = other RNA
aaatttgccttgtgagcagcc

SEQ ID NO: 4492 - RNA, 21 nt, synthetic construct
  misc_feature 1..21: note = Synthetic
  source 1..21: mol_type = other RNA
aatttgccttgtgagcagcca

SEQ ID NO: 4493 - RNA, 21 nt, synthetic construct
  misc_feature 1..21: note = Synthetic
  source 1..21: mol_type = other RNA
atttgccttgtgagcagccaa

SEQ ID NO: 4494 - RNA, 21 nt, synthetic construct
  misc_feature 1..21: note = Synthetic
  source 1..21: mol_type = other RNA
tttgccttgtgagcagccaag

SEQ ID NO: 4495 - RNA, 21 nt, synthetic construct
  misc_feature 1..21: note = Synthetic
  source 1..21: mol_type = other RNA
ttgccttgtgagcagccaaga

SEQ ID NO: 4496 - RNA, 21 nt, synthetic construct
  misc_feature 1..21: note = Synthetic
  source 1..21: mol_type = other RNA
tgccttgtgagcagccaagag

SEQ ID NO: 4497 - RNA, 21 nt, synthetic construct
  misc_feature 1..21: note = Synthetic
  source 1..21: mol_type = other RNA
gccttgtgagcagccaagagc

SEQ ID NO: 4498 - RNA, 21 nt, synthetic construct
  misc_feature 1..21: note = Synthetic
  source 1..21: mol_type = other RNA
ccttgtgagcagccaagagcc

SEQ ID NO: 4499 - RNA, 21 nt, synthetic construct
  misc_feature 1..21: note = Synthetic
  source 1..21: mol_type = other RNA
cttgtgagcagccaagagccc

SEQ ID NO: 4500 - RNA, 21 nt, synthetic construct
  misc_feature 1..21: note = Synthetic
  source 1..21: mol_type = other RNA
ttgtgagcagccaagagccca

SEQ ID NO: 4501 - RNA, 21 nt, synthetic construct
  misc_feature 1..21: note = Synthetic
  source 1..21: mol_type = other RNA
tgtgagcagccaagagcccaa

SEQ ID NO: 4502 - RNA, 21 nt, synthetic construct
  misc_feature 1..21: note = Synthetic
  source 1..21: mol_type = other RNA
gtgagcagccaagagcccaat

SEQ ID NO: 4503 - RNA, 21 nt, synthetic construct
  misc_feature 1..21: note = Synthetic
  source 1..21: mol_type = other RNA
tgagcagccaagagcccaatg

SEQ ID NO: 4504 - RNA, 21 nt, synthetic construct
  misc_feature 1..21: note = Synthetic
  source 1..21: mol_type = other RNA
gagcagccaagagcccaatga

SEQ ID NO: 4505 - RNA, 21 nt, synthetic construct
  misc_feature 1..21: note = Synthetic
  source 1..21: mol_type = other RNA
agcagccaagagcccaatgag

SEQ ID NO: 4506 - RNA, 21 nt, synthetic construct
  misc_feature 1..21: note = Synthetic
  source 1..21: mol_type = other RNA
gcagccaagagcccaatgagt

SEQ ID NO: 4507 - RNA, 21 nt, synthetic construct
  misc_feature 1..21: note = Synthetic
  source 1..21: mol_type = other RNA
cagccaagagcccaatgagtt

SEQ ID NO: 4508 - RNA, 21 nt, synthetic construct
  misc_feature 1..21: note = Synthetic
  source 1..21: mol_type = other RNA
agccaagagcccaatgagttg

SEQ ID NO: 4509 - RNA, 21 nt, synthetic construct
  misc_feature 1..21: note = Synthetic
  source 1..21: mol_type = other RNA
gccaagagcccaatgagttga

SEQ ID NO: 4510 - RNA, 21 nt, synthetic construct
  misc_feature 1..21: note = Synthetic
  source 1..21: mol_type = other RNA
ccaagagcccaatgagttgat

SEQ ID NO: 4511 - RNA, 21 nt, synthetic construct
  misc_feature 1..21: note = Synthetic
  source 1..21: mol_type = other RNA
caagagcccaatgagttgatg

SEQ ID NO: 4512 - RNA, 21 nt, synthetic construct
  misc_feature 1..21: note = Synthetic
  source 1..21: mol_type = other RNA
aagagcccaatgagttgatgc

SEQ ID NO: 4513 - RNA, 21 nt, synthetic construct
  misc_feature 1..21: note = Synthetic
  source 1..21: mol_type = other RNA
agagcccaatgagttgatgca

SEQ ID NO: 4514 - RNA, 21 nt, synthetic construct
  misc_feature 1..21: note = Synthetic
  source 1..21: mol_type = other RNA
gagcccaatgagttgatgcat

SEQ ID NO: 4515 - RNA, 21 nt, synthetic construct
  misc_feature 1..21: note = Synthetic
  source 1..21: mol_type = other RNA
agcccaatgagttgatgcata

SEQ ID NO: 4516 - RNA, 21 nt, synthetic construct
  misc_feature 1..21: note = Synthetic
  source 1..21: mol_type = other RNA
gcccaatgagttgatgcatac

SEQ ID NO: 4517 - RNA, 21 nt, synthetic construct
  misc_feature 1..21: note = Synthetic
  source 1..21: mol_type = other RNA
cccaatgagttgatgcatacg

SEQ ID NO: 4518 - RNA, 21 nt, synthetic construct
  misc_feature 1..21: note = Synthetic
  source 1..21: mol_type = other RNA
ccaatgagttgatgcatacgc

SEQ ID NO: 4519 - RNA, 21 nt, synthetic construct
  misc_feature 1..21: note = Synthetic
  source 1..21: mol_type = other RNA
caatgagttgatgcatacgcg

SEQ ID NO: 4520 - RNA, 21 nt, synthetic construct
  misc_feature 1..21: note = Synthetic
  source 1..21: mol_type = other RNA
aatgagttgatgcatacgcgc

SEQ ID NO: 4521 - RNA, 21 nt, synthetic construct
  misc_feature 1..21: note = Synthetic
  source 1..21: mol_type = other RNA
atgagttgatgcatacgcgct

SEQ ID NO: 4522 - RNA, 21 nt, synthetic construct
  misc_feature 1..21: note = Synthetic
  source 1..21: mol_type = other RNA
tgagttgatgcatacgcgctc

SEQ ID NO: 4523 - RNA, 21 nt, synthetic construct
  misc_feature 1..21: note = Synthetic
  source 1..21: mol_type = other RNA
gagttgatgcatacgcgctca

SEQ ID NO: 4524 - RNA, 21 nt, synthetic construct
  misc_feature 1..21: note = Synthetic
  source 1..21: mol_type = other RNA
agttgatgcatacgcgctcac

SEQ ID NO: 4525 - RNA, 21 nt, synthetic construct
  misc_feature 1..21: note = Synthetic
  source 1..21: mol_type = other RNA
gttgatgcatacgcgctcact

SEQ ID NO: 4526 - RNA, 21 nt, synthetic construct
  misc_feature 1..21: note = Synthetic
  source 1..21: mol_type = other RNA
ttgatgcatacgcgctcactc

SEQ ID NO: 4527 - RNA, 21 nt, synthetic construct
  misc_feature 1..21: note = Synthetic
  source 1..21: mol_type = other RNA
tgatgcatacgcgctcactct

SEQ ID NO: 4528 - RNA, 21 nt, synthetic construct
  misc_feature 1..21: note = Synthetic
  source 1..21: mol_type = other RNA
gatgcatacgcgctcactcta

SEQ ID NO: 4529 - RNA, 21 nt, synthetic construct
  misc_feature 1..21: note = Synthetic
  source 1..21: mol_type = other RNA
atgcatacgcgctcactctaa

SEQ ID NO: 4530 - RNA, 21 nt, synthetic construct
  misc_feature 1..21: note = Synthetic
  source 1..21: mol_type = other RNA
tgcatacgcgctcactctaac

SEQ ID NO: 4531 - RNA, 21 nt, synthetic construct
  misc_feature 1..21: note = Synthetic
  source 1..21: mol_type = other RNA
gcatacgcgctcactctaaca

SEQ ID NO: 4532 - RNA, 21 nt, synthetic construct
  misc_feature 1..21: note = Synthetic
  source 1..21: mol_type = other RNA
catacgcgctcactctaacac

SEQ ID NO: 4533 - RNA, 21 nt, synthetic construct
  misc_feature 1..21: note = Synthetic
  source 1..21: mol_type = other RNA
atacgcgctcactctaacacg

SEQ ID NO: 4534 - RNA, 21 nt, synthetic construct
  misc_feature 1..21: note = Synthetic
  source 1..21: mol_type = other RNA
tacgcgctcactctaacacgc

SEQ ID NO: 4535 - RNA, 21 nt, synthetic construct
  misc_feature 1..21: note = Synthetic
  source 1..21: mol_type = other RNA
acgcgctcactctaacacgca

SEQ ID NO: 4536 - RNA, 21 nt, synthetic construct
  misc_feature 1..21: note = Synthetic
  source 1..21: mol_type = other RNA
cgcgctcactctaacacgcac

SEQ ID NO: 4537 - RNA, 21 nt, synthetic construct
  misc_feature 1..21: note = Synthetic
  source 1..21: mol_type = other RNA
gcgctcactctaacacgcaca

SEQ ID NO: 4538 - RNA, 21 nt, synthetic construct
  misc_feature 1..21: note = Synthetic
  source 1..21: mol_type = other RNA
cgctcactctaacacgcacac

SEQ ID NO: 4539 - RNA, 21 nt, synthetic construct
  misc_feature 1..21: note = Synthetic
  source 1..21: mol_type = other RNA
gctcactctaacacgcacaca

SEQ ID NO: 4540 - RNA, 21 nt, synthetic construct
  misc_feature 1..21: note = Synthetic
  source 1..21: mol_type = other RNA
ctcactctaacacgcacacat

SEQ ID NO: 4541 - RNA, 21 nt, synthetic construct
  misc_feature 1..21: note = Synthetic
  source 1..21: mol_type = other RNA
tcactctaacacgcacacatg

SEQ ID NO: 4542 - RNA, 21 nt, synthetic construct
  misc_feature 1..21: note = Synthetic
  source 1..21: mol_type = other RNA
cactctaacacgcacacatgc

SEQ ID NO: 4543 - RNA, 21 nt, synthetic construct
  misc_feature 1..21: note = Synthetic
  source 1..21: mol_type = other RNA
actctaacacgcacacatgca

SEQ ID NO: 4544 - RNA, 21 nt, synthetic construct
  misc_feature 1..21: note = Synthetic
  source 1..21: mol_type = other RNA
ctctaacacgcacacatgcaa

SEQ ID NO: 4545 - RNA, 21 nt, synthetic construct
  misc_feature 1..21: note = Synthetic
  source 1..21: mol_type = other RNA
tctaacacgcacacatgcaag

SEQ ID NO: 4546 - RNA, 21 nt, synthetic construct
  misc_feature 1..21: note = Synthetic
  source 1..21: mol_type = other RNA
ctaacacgcacacatgcaagg

SEQ ID NO: 4547 - RNA, 21 nt, synthetic construct
  misc_feature 1..21: note = Synthetic
  source 1..21: mol_type = other RNA
taacacgcacacatgcaaggg

SEQ ID NO: 4548 - RNA, 21 nt, synthetic construct
  misc_feature 1..21: note = Synthetic
  source 1..21: mol_type = other RNA
aacacgcacacatgcaaggga

SEQ ID NO: 4549 - RNA, 21 nt, synthetic construct
  misc_feature 1..21: note = Synthetic
  source 1..21: mol_type = other RNA
acacgcacacatgcaagggac

SEQ ID NO: 4550 - RNA, 21 nt, synthetic construct
  misc_feature 1..21: note = Synthetic
  source 1..21: mol_type = other RNA
cacgcacacatgcaagggaca

SEQ ID NO: 4551 - RNA, 21 nt, synthetic construct
  misc_feature 1..21: note = Synthetic
  source 1..21: mol_type = other RNA
acgcacacatgcaagggacac

SEQ ID NO: 4552 - RNA, 21 nt, synthetic construct
  misc_feature 1..21: note = Synthetic
  source 1..21: mol_type = other RNA
cgcacacatgcaagggacaca

SEQ ID NO: 4553 - RNA, 21 nt, synthetic construct
  misc_feature 1..21: note = Synthetic
  source 1..21: mol_type = other RNA
gcacacatgcaagggacacag

SEQ ID NO: 4554 - RNA, 21 nt, synthetic construct
  misc_feature 1..21: note = Synthetic
  source 1..21: mol_type = other RNA
cacacatgcaagggacacaga

SEQ ID NO: 4555 - RNA, 21 nt, synthetic construct
  misc_feature 1..21: note = Synthetic
  source 1..21: mol_type = other RNA
acacatgcaagggacacagaa

SEQ ID NO: 4556 - RNA, 21 nt, synthetic construct
  misc_feature 1..21: note = Synthetic
  source 1..21: mol_type = other RNA
cacatgcaagggacacagaac

SEQ ID NO: 4557 - RNA, 21 nt, synthetic construct
  misc_feature 1..21: note = Synthetic
  source 1..21: mol_type = other RNA
acatgcaagggacacagaaca

SEQ ID NO: 4558 - RNA, 21 nt, synthetic construct
  misc_feature 1..21: note = Synthetic
  source 1..21: mol_type = other RNA
catgcaagggacacagaacac

SEQ ID NO: 4559 - RNA, 21 nt, synthetic construct
  misc_feature 1..21: note = Synthetic
  source 1..21: mol_type = other RNA
atgcaagggacacagaacaca

SEQ ID NO: 4560 - RNA, 21 nt, synthetic construct
  misc_feature 1..21: note = Synthetic
  source 1..21: mol_type = other RNA
tgcaagggacacagaacacat

SEQ ID NO: 4561 - RNA, 21 nt, synthetic construct
  misc_feature 1..21: note = Synthetic
  source 1..21: mol_type = other RNA
gcaagggacacagaacacata

SEQ ID NO: 4562 - RNA, 21 nt, synthetic construct
  misc_feature 1..21: note = Synthetic
  source 1..21: mol_type = other RNA
caagggacacagaacacatac

SEQ ID NO: 4563 - RNA, 21 nt, synthetic construct
  misc_feature 1..21: note = Synthetic
  source 1..21: mol_type = other RNA
aagggacacagaacacataca

SEQ ID NO: 4564 - RNA, 21 nt, synthetic construct
  misc_feature 1..21: note = Synthetic
  source 1..21: mol_type = other RNA
agggacacagaacacatacag

SEQ ID NO: 4565 - RNA, 21 nt, synthetic construct
  misc_feature 1..21: note = Synthetic
  source 1..21: mol_type = other RNA
gggacacagaacacatacaga

SEQ ID NO: 4566 - RNA, 21 nt, synthetic construct
  misc_feature 1..21: note = Synthetic
  source 1..21: mol_type = other RNA
ggacacagaacacatacagat

SEQ ID NO: 4567 - RNA, 21 nt, synthetic construct
  misc_feature 1..21: note = Synthetic
  source 1..21: mol_type = other RNA
gacacagaacacatacagatg

SEQ ID NO: 4568 - RNA, 21 nt, synthetic construct
  misc_feature 1..21: note = Synthetic
  source 1..21: mol_type = other RNA
acacagaacacatacagatgg

SEQ ID NO: 4569 - RNA, 21 nt, synthetic construct
  misc_feature 1..21: note = Synthetic
  source 1..21: mol_type = other RNA
cacagaacacatacagatgga

SEQ ID NO: 4570 - RNA, 21 nt, synthetic construct
  misc_feature 1..21: note = Synthetic
  source 1..21: mol_type = other RNA
acagaacacatacagatggag

SEQ ID NO: 4571 - RNA, 21 nt, synthetic construct
  misc_feature 1..21: note = Synthetic
  source 1..21: mol_type = other RNA
cagaacacatacagatggagg

SEQ ID NO: 4572 - RNA, 21 nt, synthetic construct
  misc_feature 1..21: note = Synthetic
  source 1..21: mol_type = other RNA
agaacacatacagatggaggg

SEQ ID NO: 4573 - RNA, 21 nt, synthetic construct
  misc_feature 1..21: note = Synthetic
  source 1..21: mol_type = other RNA
gaacacatacagatggaggga

SEQ ID NO: 4574 - RNA, 21 nt, synthetic construct
  misc_feature 1..21: note = Synthetic
  source 1..21: mol_type = other RNA
aacacatacagatggagggac

SEQ ID NO: 4575 - RNA, 21 nt, synthetic construct
  misc_feature 1..21: note = Synthetic
  source 1..21: mol_type = other RNA
acacatacagatggagggaca

SEQ ID NO: 4576 - RNA, 21 nt, synthetic construct
  misc_feature 1..21: note = Synthetic
  source 1..21: mol_type = other RNA
cacatacagatggagggacag

SEQ ID NO: 4577 - RNA, 21 nt, synthetic construct
  misc_feature 1..21: note = Synthetic
  source 1..21: mol_type = other RNA
acatacagatggagggacaga

SEQ ID NO: 4578 - RNA, 21 nt, synthetic construct
  misc_feature 1..21: note = Synthetic
  source 1..21: mol_type = other RNA
catacagatggagggacagag

SEQ ID NO: 4579 - RNA, 21 nt, synthetic construct
  misc_feature 1..21: note = Synthetic
  source 1..21: mol_type = other RNA
atacagatggagggacagaga

SEQ ID NO: 4580 - RNA, 21 nt, synthetic construct
  misc_feature 1..21: note = Synthetic
  source 1..21: mol_type = other RNA
tacagatggagggacagagag

SEQ ID NO: 4581 - RNA, 21 nt, synthetic construct
  misc_feature 1..21: note = Synthetic
  source 1..21: mol_type = other RNA
acagatggagggacagagagg

SEQ ID NO: 4582 - RNA, 21 nt, synthetic construct
  misc_feature 1..21: note = Synthetic
  source 1..21: mol_type = other RNA
cagatggagggacagagaggg

SEQ ID NO: 4583 - RNA, 21 nt, synthetic construct
  misc_feature 1..21: note = Synthetic
  source 1..21: mol_type = other RNA
agatggagggacagagagggg

SEQ ID NO: 4584 - RNA, 21 nt, synthetic construct
  misc_feature 1..21: note = Synthetic
  source 1..21: mol_type = other RNA
gatggagggacagagagggga

SEQ ID NO: 4585 - RNA, 21 nt, synthetic construct
  misc_feature 1..21: note = Synthetic
  source 1..21: mol_type = other RNA
atggagggacagagaggggac

SEQ ID NO: 4586 - RNA, 21 nt, synthetic construct
  misc_feature 1..21: note = Synthetic
  source 1..21: mol_type = other RNA
tggagggacagagaggggacc

SEQ ID NO: 4587 - DNA, 21 bp, synthetic construct
  misc_feature 1..21: note = Synthetic
  source 1..21: mol_type = other DNA
ggagggacagagaggggacca

SEQ ID NO: 4588 - DNA, 21 bp, synthetic construct
  misc_feature 1..21: note = Synthetic
  source 1..21: mol_type = other DNA
gagggacagagaggggaccac

SEQ ID NO: 4589 - DNA, 21 bp, synthetic construct
  misc_feature 1..21: note = Synthetic
  source 1..21: mol_type = other DNA
agggacagagaggggaccaca

SEQ ID NO: 4590 - DNA, 21 bp, synthetic construct
  misc_feature 1..21: note = Synthetic
  source 1..21: mol_type = other DNA
gggacagagaggggaccacag

SEQ ID NO: 4591 - DNA, 21 bp, synthetic construct
  misc_feature 1..21: note = Synthetic
  source 1..21: mol_type = other DNA
ggacagagaggggaccacagc

SEQ ID NO: 4592 - DNA, 21 bp, synthetic construct
  misc_feature 1..21: note = Synthetic
  source 1..21: mol_type = other DNA
gacagagaggggaccacagcg

SEQ ID NO: 4593 - DNA, 21 bp, synthetic construct
  misc_feature 1..21: note = Synthetic
  source 1..21: mol_type = other DNA
acagagaggggaccacagcgg

SEQ ID NO: 4594 - DNA, 21 bp, synthetic construct
  misc_feature 1..21: note = Synthetic
  source 1..21: mol_type = other DNA
cagagaggggaccacagcggg

SEQ ID NO: 4595 - DNA, 21 bp, synthetic construct
  misc_feature 1..21: note = Synthetic
  source 1..21: mol_type = other DNA
agagaggggaccacagcgggg

SEQ ID NO: 4596 - DNA, 21 bp, synthetic construct
  misc_feature 1..21: note = Synthetic
  source 1..21: mol_type = other DNA
gagaggggaccacagcggggc

SEQ ID NO: 4597 - DNA, 21 bp, synthetic construct
  misc_feature 1..21: note = Synthetic
  source 1..21: mol_type = other DNA
agaggggaccacagcggggcc

SEQ ID NO: 4598 - DNA, 21 bp, synthetic construct
  misc_feature 1..21: note = Synthetic
  source 1..21: mol_type = other DNA
gaggggaccacagcggggcca

SEQ ID NO: 4599 - RNA, 21 nt, synthetic construct
  misc_feature 1..21: note = Synthetic
  source 1..21: mol_type = other RNA
aggggaccacagcggggccat

SEQ ID NO: 4600 - RNA, 21 nt, synthetic construct
  misc_feature 1..21: note = Synthetic
  source 1..21: mol_type = other RNA
ggggaccacagcggggccatc

SEQ ID NO: 4601 - RNA, 21 nt, synthetic construct
  misc_feature 1..21: note = Synthetic
  source 1..21: mol_type = other RNA
gggaccacagcggggccatcg

SEQ ID NO: 4602 - RNA, 21 nt, synthetic construct
  misc_feature 1..21: note = Synthetic
  source 1..21: mol_type = other RNA
ggaccacagcggggccatcgc

SEQ ID NO: 4603 - RNA, 21 nt, synthetic construct
  misc_feature 1..21: note = Synthetic
  source 1..21: mol_type = other RNA
gaccacagcggggccatcgca

SEQ ID NO: 4604 - RNA, 21 nt, synthetic construct
  misc_feature 1..21: note = Synthetic
  source 1..21: mol_type = other RNA
accacagcggggccatcgcac

SEQ ID NO: 4605 - RNA, 21 nt, synthetic construct
  misc_feature 1..21: note = Synthetic
  source 1..21: mol_type = other RNA
ccacagcggggccatcgcaca

SEQ ID NO: 4606 - RNA, 21 nt, synthetic construct
  misc_feature 1..21: note = Synthetic
  source 1..21: mol_type = other RNA
cacagcggggccatcgcacac

SEQ ID NO: 4607 - RNA, 21 nt, synthetic construct
  misc_feature 1..21: note = Synthetic
  source 1..21: mol_type = other RNA
acagcggggccatcgcacaca

SEQ ID NO: 4608 - RNA, 21 nt, synthetic construct
  misc_feature 1..21: note = Synthetic
  source 1..21: mol_type = other RNA
cagcggggccatcgcacacat

SEQ ID NO: 4609 - RNA, 21 nt, synthetic construct
  misc_feature 1..21: note = Synthetic
  source 1..21: mol_type = other RNA
agcggggccatcgcacacatg

SEQ ID NO: 4610 - RNA, 21 nt, synthetic construct
  misc_feature 1..21: note = Synthetic
  source 1..21: mol_type = other RNA
gcggggccatcgcacacatgc

SEQ ID NO: 4611 - RNA, 21 nt, synthetic construct
  misc_feature 1..21: note = Synthetic
  source 1..21: mol_type = other RNA
cggggccatcgcacacatgcg

SEQ ID NO: 4612 - RNA, 21 nt, synthetic construct
  misc_feature 1..21: note = Synthetic
  source 1..21: mol_type = other RNA
ggggccatcgcacacatgcgc

SEQ ID NO: 4613 - RNA, 21 nt, synthetic construct
  misc_feature 1..21: note = Synthetic
  source 1..21: mol_type = other RNA
gggccatcgcacacatgcgct

SEQ ID NO: 4614 - RNA, 21 nt, synthetic construct
  misc_feature 1..21: note = Synthetic
  source 1..21: mol_type = other RNA
ggccatcgcacacatgcgctc

SEQ ID NO: 4615 - RNA, 21 nt, synthetic construct
  misc_feature 1..21: note = Synthetic
  source 1..21: mol_type = other RNA
gccatcgcacacatgcgctct

SEQ ID NO: 4616 - RNA, 21 nt, synthetic construct
  misc_feature 1..21: note = Synthetic
  source 1..21: mol_type = other RNA
ccatcgcacacatgcgctctc

SEQ ID NO: 4617 - RNA, 21 nt, synthetic construct
  misc_feature 1..21: note = Synthetic
  source 1..21: mol_type = other RNA
catcgcacacatgcgctctca

SEQ ID NO: 4618 - RNA, 21 nt, synthetic construct
  misc_feature 1..21: note = Synthetic
  source 1..21: mol_type = other RNA
atcgcacacatgcgctctcat

SEQ ID NO: 4619 - RNA, 21 nt, synthetic construct
  misc_feature 1..21: note = Synthetic
  source 1..21: mol_type = other RNA
tcgcacacatgcgctctcatg

SEQ ID NO: 4620 - RNA, 21 nt, synthetic construct
  misc_feature 1..21: note = Synthetic
  source 1..21: mol_type = other RNA
cgcacacatgcgctctcatgc

SEQ ID NO: 4621 - RNA, 21 nt, synthetic construct
  misc_feature 1..21: note = Synthetic
  source 1..21: mol_type = other RNA
gcacacatgcgctctcatgcc

SEQ ID NO: 4622 - RNA, 21 nt, synthetic construct
  misc_feature 1..21: note = Synthetic
  source 1..21: mol_type = other RNA
cacacatgcgctctcatgcca

SEQ ID NO: 4623 - RNA, 21 nt, synthetic construct
  misc_feature 1..21: note = Synthetic
  source 1..21: mol_type = other RNA
acacatgcgctctcatgccac

SEQ ID NO: 4624 - RNA, 21 nt, synthetic construct
  misc_feature 1..21: note = Synthetic
  source 1..21: mol_type = other RNA
cacatgcgctctcatgccaca

SEQ ID NO: 4625 - RNA, 21 nt, synthetic construct
  misc_feature 1..21: note = Synthetic
  source 1..21: mol_type = other RNA
acatgcgctctcatgccacaa

SEQ ID NO: 4626 - RNA, 21 nt, synthetic construct
  misc_feature 1..21: note = Synthetic
  source 1..21: mol_type = other RNA
catgcgctctcatgccacaac

SEQ ID NO: 4627 - RNA, 21 nt, synthetic construct
  misc_feature 1..21: note = Synthetic
  source 1..21: mol_type = other RNA
atgcgctctcatgccacaaca

SEQ ID NO: 4628 - RNA, 21 nt, synthetic construct
  misc_feature 1..21: note = Synthetic
  source 1..21: mol_type = other RNA
tgcgctctcatgccacaacat

SEQ ID NO: 4629 - RNA, 21 nt, synthetic construct
  misc_feature 1..21: note = Synthetic
  source 1..21: mol_type = other RNA
gcgctctcatgccacaacatt

SEQ ID NO: 4630 - RNA, 21 nt, synthetic construct
  misc_feature 1..21: note = Synthetic
  source 1..21: mol_type = other RNA
cgctctcatgccacaacattc

SEQ ID NO: 4631 - RNA, 21 nt, synthetic construct
  misc_feature 1..21: note = Synthetic
  source 1..21: mol_type = other RNA
gctctcatgccacaacattcc

SEQ ID NO: 4632 - RNA, 21 nt, synthetic construct
  misc_feature 1..21: note = Synthetic
  source 1..21: mol_type = other RNA
ctctcatgccacaacattcca

SEQ ID NO: 4633 - RNA, 21 nt, synthetic construct
  misc_feature 1..21: note = Synthetic
  source 1..21: mol_type = other RNA
tctcatgccacaacattccag

SEQ ID NO: 4634 - RNA, 21 nt, synthetic construct
  misc_feature 1..21: note = Synthetic
  source 1..21: mol_type = other RNA
ctcatgccacaacattccagt

SEQ ID NO: 4635 - RNA, 21 nt, synthetic construct
  misc_feature 1..21: note = Synthetic
  source 1..21: mol_type = other RNA
tcatgccacaacattccagtc

SEQ ID NO: 4636 - RNA, 21 nt, synthetic construct
  misc_feature 1..21: note = Synthetic
  source 1..21: mol_type = other RNA
catgccacaacattccagtcc

SEQ ID NO: 4637 - RNA, 21 nt, synthetic construct
  misc_feature 1..21: note = Synthetic
  source 1..21: mol_type = other RNA
atgccacaacattccagtcca

SEQ ID NO: 4638 - RNA, 21 nt, synthetic construct
  misc_feature 1..21: note = Synthetic
  source 1..21: mol_type = other RNA
tgccacaacattccagtccat

SEQ ID NO: 4639 - RNA, 21 nt, synthetic construct
  misc_feature 1..21: note = Synthetic
  source 1..21: mol_type = other RNA
gccacaacattccagtccatc

SEQ ID NO: 4640 - RNA, 21 nt, synthetic construct
  misc_feature 1..21: note = Synthetic
  source 1..21: mol_type = other RNA
ccacaacattccagtccatct

SEQ ID NO: 4641 - RNA, 21 nt, synthetic construct
  misc_feature 1..21: note = Synthetic
  source 1..21: mol_type = other RNA
cacaacattccagtccatctg

SEQ ID NO: 4642 - RNA, 21 nt, synthetic construct
  misc_feature 1..21: note = Synthetic
  source 1..21: mol_type = other RNA
acaacattccagtccatctgg

SEQ ID NO: 4643 - RNA, 21 nt, synthetic construct
  misc_feature 1..21: note = Synthetic
  source 1..21: mol_type = other RNA
caacattccagtccatctggg

SEQ ID NO: 4644 - RNA, 21 nt, synthetic construct
  misc_feature 1..21: note = Synthetic
  source 1..21: mol_type = other RNA
aacattccagtccatctgggg

SEQ ID NO: 4645 - RNA, 21 nt, synthetic construct
  misc_feature 1..21: note = Synthetic
  source 1..21: mol_type = other RNA
acattccagtccatctggggc

SEQ ID NO: 4646 - RNA, 21 nt, synthetic construct
  misc_feature 1..21: note = Synthetic
  source 1..21: mol_type = other RNA
cattccagtccatctggggct

SEQ ID NO: 4647 - RNA, 21 nt, synthetic construct
  misc_feature 1..21: note = Synthetic
  source 1..21: mol_type = other RNA
attccagtccatctggggcta

SEQ ID NO: 4648 - RNA, 21 nt, synthetic construct
  misc_feature 1..21: note = Synthetic
  source 1..21: mol_type = other RNA
ttccagtccatctggggctat

SEQ ID NO: 4649 - RNA, 21 nt, synthetic construct
  misc_feature 1..21: note = Synthetic
  source 1..21: mol_type = other RNA
tccagtccatctggggctatc

SEQ ID NO: 4650 - RNA, 21 nt, synthetic construct
  misc_feature 1..21: note = Synthetic
  source 1..21: mol_type = other RNA
ccagtccatctggggctatct

SEQ ID NO: 4651 - RNA, 21 nt, synthetic construct
  misc_feature 1..21: note = Synthetic
  source 1..21: mol_type = other RNA
cagtccatctggggctatctc

SEQ ID NO: 4652 - RNA, 21 nt, synthetic construct
  misc_feature 1..21: note = Synthetic
  source 1..21: mol_type = other RNA
agtccatctggggctatctcc

SEQ ID NO: 4653 - RNA, 21 nt, synthetic construct
  misc_feature 1..21: note = Synthetic
  source 1..21: mol_type = other RNA
gtccatctggggctatctcct

SEQ ID NO: 4654 - RNA, 21 nt, synthetic construct
  misc_feature 1..21: note = Synthetic
  source 1..21: mol_type = other RNA
tccatctggggctatctcctc

SEQ ID NO: 4655 - RNA, 21 nt, synthetic construct
  misc_feature 1..21: note = Synthetic
  source 1..21: mol_type = other RNA
ccatctggggctatctcctct

SEQ ID NO: 4656 - RNA, 21 nt, synthetic construct
  misc_feature 1..21: note = Synthetic
  source 1..21: mol_type = other RNA
catctggggctatctcctctg

SEQ ID NO: 4657 - RNA, 21 nt, synthetic construct
  misc_feature 1..21: note = Synthetic
  source 1..21: mol_type = other RNA
atctggggctatctcctctgg

SEQ ID NO: 4658 - RNA, 21 nt, synthetic construct
  misc_feature 1..21: note = Synthetic
  source 1..21: mol_type = other RNA
tctggggctatctcctctggg

SEQ ID NO: 4659 - RNA, 21 nt, synthetic construct
  misc_feature 1..21: note = Synthetic
  source 1..21: mol_type = other RNA
ctggggctatctcctctgggg

SEQ ID NO: 4660 - RNA, 21 nt, synthetic construct
  misc_feature 1..21: note = Synthetic
  source 1..21: mol_type = other RNA
tggggctatctcctctgggga

SEQ ID NO: 4661 - RNA, 21 nt, synthetic construct
  misc_feature 1..21: note = Synthetic
  source 1..21: mol_type = other RNA
ggggctatctcctctggggac

SEQ ID NO: 4662 - RNA, 21 nt, synthetic construct
  misc_feature 1..21: note = Synthetic
  source 1..21: mol_type = other RNA
gggctatctcctctggggaca

SEQ ID NO: 4663 - RNA, 21 nt, synthetic construct
  misc_feature 1..21: note = Synthetic
  source 1..21: mol_type = other RNA
ggctatctcctctggggacag

SEQ ID NO: 4664 - RNA, 21 nt, synthetic construct
  misc_feature 1..21: note = Synthetic
  source 1..21: mol_type = other RNA
gctatctcctctggggacagg

SEQ ID NO: 4665 - RNA, 21 nt, synthetic construct
  misc_feature 1..21: note = Synthetic
  source 1..21: mol_type = other RNA
ctatctcctctggggacaggg

SEQ ID NO: 4666 - RNA, 21 nt, synthetic construct
  misc_feature 1..21: note = Synthetic
  source 1..21: mol_type = other RNA
tatctcctctggggacaggga

SEQ ID NO: 4667 - RNA, 21 nt, synthetic construct
  misc_feature 1..21: note = Synthetic
  source 1..21: mol_type = other RNA
atctcctctggggacagggag

SEQ ID NO: 4668 - RNA, 21 nt, synthetic construct
  misc_feature 1..21: note = Synthetic
  source 1..21: mol_type = other RNA
tctcctctggggacagggagc

SEQ ID NO: 4669 - RNA, 21 nt, synthetic construct
  misc_feature 1..21: note = Synthetic
  source 1..21: mol_type = other RNA
ctcctctggggacagggagcg

SEQ ID NO: 4670 - RNA, 21 nt, synthetic construct
  misc_feature 1..21: note = Synthetic
  source 1..21: mol_type = other RNA
tcctctggggacagggagcgg

SEQ ID NO: 4671 - RNA, 21 nt, synthetic construct
  misc_feature 1..21: note = Synthetic
  source 1..21: mol_type = other RNA
cctctggggacagggagcggt

SEQ ID NO: 4672 - RNA, 21 nt, synthetic construct
  misc_feature 1..21: note = Synthetic
  source 1..21: mol_type = other RNA
ctctggggacagggagcggtg

SEQ ID NO: 4673 - RNA, 21 nt, synthetic construct
  misc_feature 1..21: note = Synthetic
  source 1..21: mol_type = other RNA
tctggggacagggagcggtgg

SEQ ID NO: 4674 - RNA, 21 nt, synthetic construct
  misc_feature 1..21: note = Synthetic
  source 1..21: mol_type = other RNA
ctggggacagggagcggtggc

SEQ ID NO: 4675 - RNA, 21 nt, synthetic construct
  misc_feature 1..21: note = Synthetic
  source 1..21: mol_type = other RNA
tggggacagggagcggtggcc

SEQ ID NO: 4676 - RNA, 21 nt, synthetic construct
  misc_feature 1..21: note = Synthetic
  source 1..21: mol_type = other RNA
ggggacagggagcggtggcct

SEQ ID NO: 4677 - RNA, 21 nt, synthetic construct
  misc_feature 1..21: note = Synthetic
  source 1..21: mol_type = other RNA
gggacagggagcggtggccta

SEQ ID NO: 4678 - RNA, 21 nt, synthetic construct
  misc_feature 1..21: note = Synthetic
  source 1..21: mol_type = other RNA
ggacagggagcggtggcctaa

SEQ ID NO: 4679 - RNA, 21 nt, synthetic construct
  misc_feature 1..21: note = Synthetic
  source 1..21: mol_type = other RNA
gacagggagcggtggcctaag

SEQ ID NO: 4680 - RNA, 21 nt, synthetic construct
  misc_feature 1..21: note = Synthetic
  source 1..21: mol_type = other RNA
acagggagcggtggcctaagc

SEQ ID NO: 4681 - RNA, 21 nt, synthetic construct
  misc_feature 1..21: note = Synthetic
  source 1..21: mol_type = other RNA
cagggagcggtggcctaagcc

SEQ ID NO: 4682 - RNA, 21 nt, synthetic construct
  misc_feature 1..21: note = Synthetic
  source 1..21: mol_type = other RNA
agggagcggtggcctaagccc

SEQ ID NO: 4683 - RNA, 21 nt, synthetic construct
  misc_feature 1..21: note = Synthetic
  source 1..21: mol_type = other RNA
gggagcggtggcctaagcccc

SEQ ID NO: 4684 - RNA, 21 nt, synthetic construct
  misc_feature 1..21: note = Synthetic
  source 1..21: mol_type = other RNA
ggagcggtggcctaagccccg

SEQ ID NO: 4685 - RNA, 21 nt, synthetic construct
  misc_feature 1..21: note = Synthetic
  source 1..21: mol_type = other RNA
gagcggtggcctaagccccga

SEQ ID NO: 4686 - RNA, 21 nt, synthetic construct
  misc_feature 1..21: note = Synthetic
  source 1..21: mol_type = other RNA
agcggtggcctaagccccgaa

SEQ ID NO: 4687 - RNA, 21 nt, synthetic construct
  misc_feature 1..21: note = Synthetic
  source 1..21: mol_type = other RNA
gcggtggcctaagccccgaag

SEQ ID NO: 4688 - RNA, 21 nt, synthetic construct
  misc_feature 1..21: note = Synthetic
  source 1..21: mol_type = other RNA
cggtggcctaagccccgaagc

SEQ ID NO: 4689 - RNA, 21 nt, synthetic construct
  misc_feature 1..21: note = Synthetic
  source 1..21: mol_type = other RNA
ggtggcctaagccccgaagca

SEQ ID NO: 4690 - RNA, 21 nt, synthetic construct
  misc_feature 1..21: note = Synthetic
  source 1..21: mol_type = other RNA
gtggcctaagccccgaagcag

SEQ ID NO: 4691 - RNA, 21 nt, synthetic construct
  misc_feature 1..21: note = Synthetic
  source 1..21: mol_type = other RNA
tggcctaagccccgaagcagc

SEQ ID NO: 4692 - RNA, 21 nt, synthetic construct
  misc_feature 1..21: note = Synthetic
  source 1..21: mol_type = other RNA
ggcctaagccccgaagcagca

SEQ ID NO: 4693 - RNA, 21 nt, synthetic construct
  misc_feature 1..21: note = Synthetic
  source 1..21: mol_type = other RNA
gcctaagccccgaagcagcag

SEQ ID NO: 4694 - RNA, 21 nt, synthetic construct
  misc_feature 1..21: note = Synthetic
  source 1..21: mol_type = other RNA
cctaagccccgaagcagcagg

SEQ ID NO: 4695 - RNA, 21 nt, synthetic construct
  misc_feature 1..21: note = Synthetic
  source 1..21: mol_type = other RNA
ctaagccccgaagcagcaggt

SEQ ID NO: 4696 - RNA, 21 nt, synthetic construct
  misc_feature 1..21: note = Synthetic
  source 1..21: mol_type = other RNA
taagccccgaagcagcaggtg

SEQ ID NO: 4697 - RNA, 21 nt, synthetic construct
  misc_feature 1..21: note = Synthetic
  source 1..21: mol_type = other RNA
aagccccgaagcagcaggtgc

SEQ ID NO: 4698 - RNA, 21 nt, synthetic construct
  misc_feature 1..21: note = Synthetic
  source 1..21: mol_type = other RNA
agccccgaagcagcaggtgcc

SEQ ID NO: 4699 - RNA, 21 nt, synthetic construct
  misc_feature 1..21: note = Synthetic
  source 1..21: mol_type = other RNA
gccccgaagcagcaggtgccg

SEQ ID NO: 4700 - RNA, 21 nt, synthetic construct
  misc_feature 1..21: note = Synthetic
  source 1..21: mol_type = other RNA
ccccgaagcagcaggtgccgg

SEQ ID NO: 4701 - RNA, 21 nt, synthetic construct
  misc_feature 1..21: note = Synthetic
  source 1..21: mol_type = other RNA
cccgaagcagcaggtgccggt

SEQ ID NO: 4702 - RNA, 21 nt, synthetic construct
  misc_feature 1..21: note = Synthetic
  source 1..21: mol_type = other RNA
ccgaagcagcaggtgccggtc

SEQ ID NO: 4703 - RNA, 21 nt, synthetic construct
  misc_feature 1..21: note = Synthetic
  source 1..21: mol_type = other RNA
cgaagcagcaggtgccggtca

SEQ ID NO: 4704 - RNA, 21 nt, synthetic construct
  misc_feature 1..21: note = Synthetic
  source 1..21: mol_type = other RNA
gaagcagcaggtgccggtcag

SEQ ID NO: 4705 - RNA, 21 nt, synthetic construct
  misc_feature 1..21: note = Synthetic
  source 1..21: mol_type = other RNA
aagcagcaggtgccggtcaga

SEQ ID NO: 4706 - RNA, 21 nt, synthetic construct
  misc_feature 1..21: note = Synthetic
  source 1..21: mol_type = other RNA
agcagcaggtgccggtcagat

SEQ ID NO: 4707 - RNA, 21 nt, synthetic construct
  misc_feature 1..21: note = Synthetic
  source 1..21: mol_type = other RNA
gcagcaggtgccggtcagatg

SEQ ID NO: 4708 - RNA, 21 nt, synthetic construct
  misc_feature 1..21: note = Synthetic
  source 1..21: mol_type = other RNA
cagcaggtgccggtcagatgg

SEQ ID NO: 4709 - RNA, 21 nt, synthetic construct
  misc_feature 1..21: note = Synthetic
  source 1..21: mol_type = other RNA
agcaggtgccggtcagatgga

SEQ ID NO: 4710 - RNA, 21 nt, synthetic construct
  misc_feature 1..21: note = Synthetic
  source 1..21: mol_type = other RNA
gcaggtgccggtcagatggag

SEQ ID NO: 4711 - RNA, 21 nt, synthetic construct
  misc_feature 1..21: note = Synthetic
  source 1..21: mol_type = other RNA
caggtgccggtcagatggaga

SEQ ID NO: 4712 - RNA, 21 nt, synthetic construct
  misc_feature 1..21: note = Synthetic
  source 1..21: mol_type = other RNA
aggtgccggtcagatggagag

SEQ ID NO: 4713 - RNA, 21 nt, synthetic construct
  misc_feature 1..21: note = Synthetic
  source 1..21: mol_type = other RNA
ggtgccggtcagatggagagg

SEQ ID NO: 4714 - RNA, 21 nt, synthetic construct
  misc_feature 1..21: note = Synthetic
  source 1..21: mol_type = other RNA
gtgccggtcagatggagagga

SEQ ID NO: 4715 - RNA, 21 nt, synthetic construct
  misc_feature 1..21: note = Synthetic
  source 1..21: mol_type = other RNA
tgccggtcagatggagaggag

SEQ ID NO: 4716 - RNA, 21 nt, synthetic construct
  misc_feature 1..21: note = Synthetic
  source 1..21: mol_type = other RNA
gccggtcagatggagaggagg

SEQ ID NO: 4717 - RNA, 21 nt, synthetic construct
  misc_feature 1..21: note = Synthetic
  source 1..21: mol_type = other RNA
ccggtcagatggagaggaggg

SEQ ID NO: 4718 - RNA, 21 nt, synthetic construct
  misc_feature 1..21: note = Synthetic
  source 1..21: mol_type = other RNA
cggtcagatggagaggaggga

SEQ ID NO: 4719 - RNA, 21 nt, synthetic construct
  misc_feature 1..21: note = Synthetic
  source 1..21: mol_type = other RNA
ggtcagatggagaggagggag

SEQ ID NO: 4720 - RNA, 21 nt, synthetic construct
  misc_feature 1..21: note = Synthetic
  source 1..21: mol_type = other RNA
gtcagatggagaggagggagg

SEQ ID NO: 4721 - RNA, 21 nt, synthetic construct
  misc_feature 1..21: note = Synthetic
  source 1..21: mol_type = other RNA
tcagatggagaggagggaggc

SEQ ID NO: 4722 - RNA, 21 nt, synthetic construct
  misc_feature 1..21: note = Synthetic
  source 1..21: mol_type = other RNA
cagatggagaggagggaggcc

SEQ ID NO: 4723 - RNA, 21 nt, synthetic construct
  misc_feature 1..21: note = Synthetic
  source 1..21: mol_type = other RNA
agatggagaggagggaggccg

SEQ ID NO: 4724 - RNA, 21 nt, synthetic construct
  misc_feature 1..21: note = Synthetic
  source 1..21: mol_type = other RNA
gatggagaggagggaggccgt

SEQ ID NO: 4725 - RNA, 21 nt, synthetic construct
  misc_feature 1..21: note = Synthetic
  source 1..21: mol_type = other RNA
atggagaggagggaggccgtc

SEQ ID NO: 4726 - RNA, 21 nt, synthetic construct
  misc_feature 1..21: note = Synthetic
  source 1..21: mol_type = other RNA
tggagaggagggaggccgtct

SEQ ID NO: 4727 - RNA, 21 nt, synthetic construct
  misc_feature 1..21: note = Synthetic
  source 1..21: mol_type = other RNA
ggagaggagggaggccgtctg

SEQ ID NO: 4728 - RNA, 21 nt, synthetic construct
  misc_feature 1..21: note = Synthetic
  source 1..21: mol_type = other RNA
gagaggagggaggccgtctgt

SEQ ID NO: 4729 - RNA, 21 nt, synthetic construct
  misc_feature 1..21: note = Synthetic
  source 1..21: mol_type = other RNA
agaggagggaggccgtctgtc

SEQ ID NO: 4730 - RNA, 21 nt, synthetic construct
  misc_feature 1..21: note = Synthetic
  source 1..21: mol_type = other RNA
gaggagggaggccgtctgtcc

SEQ ID NO: 4731 - RNA, 21 nt, synthetic construct
  misc_feature 1..21: note = Synthetic
  source 1..21: mol_type = other RNA
aggagggaggccgtctgtcca

SEQ ID NO: 4732 - RNA, 21 nt, synthetic construct
  misc_feature 1..21: note = Synthetic
  source 1..21: mol_type = other RNA
ggagggaggccgtctgtccag

SEQ ID NO: 4733 - RNA, 21 nt, synthetic construct
  misc_feature 1..21: note = Synthetic
  source 1..21: mol_type = other RNA
gagggaggccgtctgtccagc

SEQ ID NO: 4734 - RNA, 21 nt, synthetic construct
  misc_feature 1..21: note = Synthetic
  source 1..21: mol_type = other RNA
agggaggccgtctgtccagcc

SEQ ID NO: 4735 - RNA, 21 nt, synthetic construct
  misc_feature 1..21: note = Synthetic
  source 1..21: mol_type = other RNA
gggaggccgtctgtccagcct

SEQ ID NO: 4736 - RNA, 21 nt, synthetic construct
  misc_feature 1..21: note = Synthetic
  source 1..21: mol_type = other RNA
ggaggccgtctgtccagcctg

SEQ ID NO: 4737 - RNA, 21 nt, synthetic construct
  misc_feature 1..21: note = Synthetic
  source 1..21: mol_type = other RNA
gaggccgtctgtccagcctgg

SEQ ID NO: 4738 - RNA, 21 nt, synthetic construct
  misc_feature 1..21: note = Synthetic
  source 1..21: mol_type = other RNA
aggccgtctgtccagcctggc

SEQ ID NO: 4739 - RNA, 21 nt, synthetic construct
  misc_feature 1..21: note = Synthetic
  source 1..21: mol_type = other RNA
ggccgtctgtccagcctggct

SEQ ID NO: 4740 - RNA, 21 nt, synthetic construct
  misc_feature 1..21: note = Synthetic
  source 1..21: mol_type = other RNA
gccgtctgtccagcctggctg

SEQ ID NO: 4741 - RNA, 21 nt, synthetic construct
  misc_feature 1..21: note = Synthetic
  source 1..21: mol_type = other RNA
ccgtctgtccagcctggctgc

SEQ ID NO: 4742 - RNA, 21 nt, synthetic construct
  misc_feature 1..21: note = Synthetic
  source 1..21: mol_type = other RNA
cgtctgtccagcctggctgct

SEQ ID NO: 4743 - RNA, 21 nt, synthetic construct
  misc_feature 1..21: note = Synthetic
  source 1..21: mol_type = other RNA
gtctgtccagcctggctgctc

SEQ ID NO: 4744 - RNA, 21 nt, synthetic construct
  misc_feature 1..21: note = Synthetic
  source 1..21: mol_type = other RNA
tctgtccagcctggctgctct

SEQ ID NO: 4745 - RNA, 21 nt, synthetic construct
  misc_feature 1..21: note = Synthetic
  source 1..21: mol_type = other RNA
ctgtccagcctggctgctctg

SEQ ID NO: 4746 - RNA, 21 nt, synthetic construct
  misc_feature 1..21: note = Synthetic
  source 1..21: mol_type = other RNA
tgtccagcctggctgctctga

SEQ ID NO: 4747 - RNA, 21 nt, synthetic construct
  misc_feature 1..21: note = Synthetic
  source 1..21: mol_type = other RNA
gtccagcctggctgctctgac

SEQ ID NO: 4748 - RNA, 21 nt, synthetic construct
  misc_feature 1..21: note = Synthetic
  source 1..21: mol_type = other RNA
tccagcctggctgctctgaca

SEQ ID NO: 4749 - RNA, 21 nt, synthetic construct
  misc_feature 1..21: note = Synthetic
  source 1..21: mol_type = other RNA
ccagcctggctgctctgacaa

SEQ ID NO: 4750 - RNA, 21 nt, synthetic construct
  misc_feature 1..21: note = Synthetic
  source 1..21: mol_type = other RNA
cagcctggctgctctgacaag

SEQ ID NO: 4751 - RNA, 21 nt, synthetic construct
  misc_feature 1..21: note = Synthetic
  source 1..21: mol_type = other RNA
agcctggctgctctgacaagg

SEQ ID NO: 4752 - RNA, 21 nt, synthetic construct
  misc_feature 1..21: note = Synthetic
  source 1..21: mol_type = other RNA
gcctggctgctctgacaaggg

SEQ ID NO: 4753 - RNA, 21 nt, synthetic construct
  misc_feature 1..21: note = Synthetic
  source 1..21: mol_type = other RNA
cctggctgctctgacaagggc

SEQ ID NO: 4754 - RNA, 21 nt, synthetic construct
  misc_feature 1..21: note = Synthetic
  source 1..21: mol_type = other RNA
ctggctgctctgacaagggcc

SEQ ID NO: 4755 - RNA, 21 nt, synthetic construct
  misc_feature 1..21: note = Synthetic
  source 1..21: mol_type = other RNA
tggctgctctgacaagggccc

SEQ ID NO: 4756 - RNA, 21 nt, synthetic construct
  misc_feature 1..21: note = Synthetic
  source 1..21: mol_type = other RNA
ggctgctctgacaagggccct

SEQ ID NO: 4757 - RNA, 21 nt, synthetic construct
  misc_feature 1..21: note = Synthetic
  source 1..21: mol_type = other RNA
gctgctctgacaagggccctg

SEQ ID NO: 4758 - RNA, 21 nt, synthetic construct
  misc_feature 1..21: note = Synthetic
  source 1..21: mol_type = other RNA
ctgctctgacaagggccctgg

SEQ ID NO: 4759 - RNA, 21 nt, synthetic construct
  misc_feature 1..21: note = Synthetic
  source 1..21: mol_type = other RNA
tgctctgacaagggccctggc

SEQ ID NO: 4760 - RNA, 21 nt, synthetic construct
  misc_feature 1..21: note = Synthetic
  source 1..21: mol_type = other RNA
gctctgacaagggccctggca

SEQ ID NO: 4761 - RNA, 21 nt, synthetic construct
  misc_feature 1..21: note = Synthetic
  source 1..21: mol_type = other RNA
ctctgacaagggccctggcag

SEQ ID NO: 4762 - RNA, 21 nt, synthetic construct
  misc_feature 1..21: note = Synthetic
  source 1..21: mol_type = other RNA
tctgacaagggccctggcagc

SEQ ID NO: 4763 - RNA, 21 nt, synthetic construct
  misc_feature 1..21: note = Synthetic
  source 1..21: mol_type = other RNA
ctgacaagggccctggcagcg

SEQ ID NO: 4764 - RNA, 21 nt, synthetic construct
  misc_feature 1..21: note = Synthetic
  source 1..21: mol_type = other RNA
tgacaagggccctggcagcga

SEQ ID NO: 4765 - RNA, 21 nt, synthetic construct
  misc_feature 1..21: note = Synthetic
  source 1..21: mol_type = other RNA
gacaagggccctggcagcgag

SEQ ID NO: 4766 - RNA, 21 nt, synthetic construct
  misc_feature 1..21: note = Synthetic
  source 1..21: mol_type = other RNA
acaagggccctggcagcgaga

SEQ ID NO: 4767 - RNA, 21 nt, synthetic construct
  misc_feature 1..21: note = Synthetic
  source 1..21: mol_type = other RNA
caagggccctggcagcgagag

SEQ ID NO: 4768 - RNA, 21 nt, synthetic construct
  misc_feature 1..21: note = Synthetic
  source 1..21: mol_type = other RNA
aagggccctggcagcgagaga

SEQ ID NO: 4769 - RNA, 21 nt, synthetic construct
  misc_feature 1..21: note = Synthetic
  source 1..21: mol_type = other RNA
agggccctggcagcgagagag

SEQ ID NO: 4770 - RNA, 21 nt, synthetic construct
  misc_feature 1..21: note = Synthetic
  source 1..21: mol_type = other RNA
gggccctggcagcgagagagg

SEQ ID NO: 4771 - RNA, 21 nt, synthetic construct
  misc_feature 1..21: note = Synthetic
  source 1..21: mol_type = other RNA
ggccctggcagcgagagaggc

SEQ ID NO: 4772 - RNA, 21 nt, synthetic construct
  misc_feature 1..21: note = Synthetic
  source 1..21: mol_type = other RNA
gccctggcagcgagagaggcc

SEQ ID NO: 4773 - RNA, 21 nt, synthetic construct
  misc_feature 1..21: note = Synthetic
  source 1..21: mol_type = other RNA
ccctggcagcgagagaggcca

SEQ ID NO: 4774 - RNA, 21 nt, synthetic construct
  misc_feature 1..21: note = Synthetic
  source 1..21: mol_type = other RNA
cctggcagcgagagaggccac

SEQ ID NO: 4775 - RNA, 21 nt, synthetic construct
  misc_feature 1..21: note = Synthetic
  source 1..21: mol_type = other RNA
ctggcagcgagagaggccacc

SEQ ID NO: 4776 - RNA, 21 nt, synthetic construct
  misc_feature 1..21: note = Synthetic
  source 1..21: mol_type = other RNA
tggcagcgagagaggccaccc

SEQ ID NO: 4777 - DNA, 21 bp, synthetic construct
  misc_feature 1..21: note = Synthetic
  source 1..21: mol_type = other DNA
ggcagcgagagaggccacccg

SEQ ID NO: 4778 - DNA, 21 bp, synthetic construct
  misc_feature 1..21: note = Synthetic
  source 1..21: mol_type = other DNA
gcagcgagagaggccacccgc

SEQ ID NO: 4779 - DNA, 21 bp, synthetic construct
  misc_feature 1..21: note = Synthetic
  source 1..21: mol_type = other DNA
cagcgagagaggccacccgcc

SEQ ID NO: 4780 - DNA, 21 bp, synthetic construct
  misc_feature 1..21: note = Synthetic
  source 1..21: mol_type = other DNA
agcgagagaggccacccgcca

SEQ ID NO: 4781 - RNA, 21 nt, synthetic construct
  misc_feature 1..21: note = Synthetic
  source 1..21: mol_type = other RNA
gcgagagaggccacccgccat

SEQ ID NO: 4782 - RNA, 21 nt, synthetic construct
  misc_feature 1..21: note = Synthetic
  source 1..21: mol_type = other RNA
cgagagaggccacccgccatc

SEQ ID NO: 4783 - RNA, 21 nt, synthetic construct
  misc_feature 1..21: note = Synthetic
  source 1..21: mol_type = other RNA
gagagaggccacccgccatcc

SEQ ID NO: 4784 - RNA, 21 nt, synthetic construct
  misc_feature 1..21: note = Synthetic
  source 1..21: mol_type = other RNA
agagaggccacccgccatccc

SEQ ID NO: 4785 - RNA, 21 nt, synthetic construct
  misc_feature 1..21: note = Synthetic
  source 1..21: mol_type = other RNA
gagaggccacccgccatccct

SEQ ID NO: 4786 - RNA, 21 nt, synthetic construct
  misc_feature 1..21: note = Synthetic
  source 1..21: mol_type = other RNA
agaggccacccgccatccctg

SEQ ID NO: 4787 - RNA, 21 nt, synthetic construct
  misc_feature 1..21: note = Synthetic
  source 1..21: mol_type = other RNA
gaggccacccgccatccctga

SEQ ID NO: 4788 - RNA, 21 nt, synthetic construct
  misc_feature 1..21: note = Synthetic
  source 1..21: mol_type = other RNA
aggccacccgccatccctgac

SEQ ID NO: 4789 - RNA, 21 nt, synthetic construct
  misc_feature 1..21: note = Synthetic
  source 1..21: mol_type = other RNA
ggccacccgccatccctgaca

SEQ ID NO: 4790 - RNA, 21 nt, synthetic construct
  misc_feature 1..21: note = Synthetic
  source 1..21: mol_type = other RNA
gccacccgccatccctgacac

SEQ ID NO: 4791 - RNA, 21 nt, synthetic construct
  misc_feature 1..21: note = Synthetic
  source 1..21: mol_type = other RNA
ccacccgccatccctgacaca

SEQ ID NO: 4792 - RNA, 21 nt, synthetic construct
  misc_feature 1..21: note = Synthetic
  source 1..21: mol_type = other RNA
cacccgccatccctgacacag

SEQ ID NO: 4793 - RNA, 21 nt, synthetic construct
  misc_feature 1..21: note = Synthetic
  source 1..21: mol_type = other RNA
acccgccatccctgacacagt

SEQ ID NO: 4794 - RNA, 21 nt, synthetic construct
  misc_feature 1..21: note = Synthetic
  source 1..21: mol_type = other RNA
cccgccatccctgacacagtc

SEQ ID NO: 4795 - RNA, 21 nt, synthetic construct
  misc_feature 1..21: note = Synthetic
  source 1..21: mol_type = other RNA
ccgccatccctgacacagtca

SEQ ID NO: 4796 - RNA, 21 nt, synthetic construct
  misc_feature 1..21: note = Synthetic
  source 1..21: mol_type = other RNA
cgccatccctgacacagtcaa

SEQ ID NO: 4797 - RNA, 21 nt, synthetic construct
  misc_feature 1..21: note = Synthetic
  source 1..21: mol_type = other RNA
gccatccctgacacagtcaat

SEQ ID NO: 4798 - RNA, 21 nt, synthetic construct
  misc_feature 1..21: note = Synthetic
  source 1..21: mol_type = other RNA
ccatccctgacacagtcaatc

SEQ ID NO: 4799 - RNA, 21 nt, synthetic construct
  misc_feature 1..21: note = Synthetic
  source 1..21: mol_type = other RNA
catccctgacacagtcaatcc

SEQ ID NO: 4800 - RNA, 21 nt, synthetic construct
  misc_feature 1..21: note = Synthetic
  source 1..21: mol_type = other RNA
atccctgacacagtcaatcct

SEQ ID NO: 4801 - RNA, 21 nt, synthetic construct
  misc_feature 1..21: note = Synthetic
  source 1..21: mol_type = other RNA
tccctgacacagtcaatcctc

SEQ ID NO: 4802 - RNA, 21 nt, synthetic construct
  misc_feature 1..21: note = Synthetic
  source 1..21: mol_type = other RNA
ccctgacacagtcaatcctcc

SEQ ID NO: 4803 - RNA, 21 nt, synthetic construct
  misc_feature 1..21: note = Synthetic
  source 1..21: mol_type = other RNA
cctgacacagtcaatcctccc

SEQ ID NO: 4804 - RNA, 21 nt, synthetic construct
  misc_feature 1..21: note = Synthetic
  source 1..21: mol_type = other RNA
ctgacacagtcaatcctccct

SEQ ID NO: 4805 - RNA, 21 nt, synthetic construct
  misc_feature 1..21: note = Synthetic
  source 1..21: mol_type = other RNA
tgacacagtcaatcctcccta

SEQ ID NO: 4806 - RNA, 21 nt, synthetic construct
  misc_feature 1..21: note = Synthetic
  source 1..21: mol_type = other RNA
gacacagtcaatcctccctaa

SEQ ID NO: 4807 - RNA, 21 nt, synthetic construct
  misc_feature 1..21: note = Synthetic
  source 1..21: mol_type = other RNA
acacagtcaatcctccctaat

SEQ ID NO: 4808 - RNA, 21 nt, synthetic construct
  misc_feature 1..21: note = Synthetic
  source 1..21: mol_type = other RNA
cacagtcaatcctccctaatc

SEQ ID NO: 4809 - RNA, 21 nt, synthetic construct
  misc_feature 1..21: note = Synthetic
  source 1..21: mol_type = other RNA
acagtcaatcctccctaatct

SEQ ID NO: 4810 - RNA, 21 nt, synthetic construct
  misc_feature 1..21: note = Synthetic
  source 1..21: mol_type = other RNA
cagtcaatcctccctaatctc

SEQ ID NO: 4811 - RNA, 21 nt, synthetic construct
  misc_feature 1..21: note = Synthetic
  source 1..21: mol_type = other RNA
agtcaatcctccctaatctcg

SEQ ID NO: 4812 - RNA, 21 nt, synthetic construct
  misc_feature 1..21: note = Synthetic
  source 1..21: mol_type = other RNA
gtcaatcctccctaatctcgg

SEQ ID NO: 4813 - RNA, 21 nt, synthetic construct
  misc_feature 1..21: note = Synthetic
  source 1..21: mol_type = other RNA
tcaatcctccctaatctcggg

SEQ ID NO: 4814 - RNA, 21 nt, synthetic construct
  misc_feature 1..21: note = Synthetic
  source 1..21: mol_type = other RNA
caatcctccctaatctcgggc

SEQ ID NO: 4815 - RNA, 21 nt, synthetic construct
  misc_feature 1..21: note = Synthetic
  source 1..21: mol_type = other RNA
aatcctccctaatctcgggcc

SEQ ID NO: 4816 - RNA, 21 nt, synthetic construct
  misc_feature 1..21: note = Synthetic
  source 1..21: mol_type = other RNA
atcctccctaatctcgggccg

SEQ ID NO: 4817 - RNA, 21 nt, synthetic construct
  misc_feature 1..21: note = Synthetic
  source 1..21: mol_type = other RNA
tcctccctaatctcgggccgg

SEQ ID NO: 4818 - RNA, 21 nt, synthetic construct
  misc_feature 1..21: note = Synthetic
  source 1..21: mol_type = other RNA
cctccctaatctcgggccgga

SEQ ID NO: 4819 - RNA, 21 nt, synthetic construct
  misc_feature 1..21: note = Synthetic
  source 1..21: mol_type = other RNA
ctccctaatctcgggccggat

SEQ ID NO: 4820 - RNA, 21 nt, synthetic construct
  misc_feature 1..21: note = Synthetic
  source 1..21: mol_type = other RNA
tccctaatctcgggccggatg

SEQ ID NO: 4821 - RNA, 21 nt, synthetic construct
  misc_feature 1..21: note = Synthetic
  source 1..21: mol_type = other RNA
ccctaatctcgggccggatgg

SEQ ID NO: 4822 - RNA, 21 nt, synthetic construct
  misc_feature 1..21: note = Synthetic
  source 1..21: mol_type = other RNA
cctaatctcgggccggatggg

SEQ ID NO: 4823 - RNA, 21 nt, synthetic construct
  misc_feature 1..21: note = Synthetic
  source 1..21: mol_type = other RNA
ctaatctcgggccggatggga

SEQ ID NO: 4824 - RNA, 21 nt, synthetic construct
  misc_feature 1..21: note = Synthetic
  source 1..21: mol_type = other RNA
taatctcgggccggatgggag

SEQ ID NO: 4825 - RNA, 21 nt, synthetic construct
  misc_feature 1..21: note = Synthetic
  source 1..21: mol_type = other RNA
aatctcgggccggatgggaga

SEQ ID NO: 4826 - RNA, 21 nt, synthetic construct
  misc_feature 1..21: note = Synthetic
  source 1..21: mol_type = other RNA
atctcgggccggatgggagaa

SEQ ID NO: 4827 - RNA, 21 nt, synthetic construct
  misc_feature 1..21: note = Synthetic
  source 1..21: mol_type = other RNA
tctcgggccggatgggagaag

SEQ ID NO: 4828 - RNA, 21 nt, synthetic construct
  misc_feature 1..21: note = Synthetic
  source 1..21: mol_type = other RNA
ctcgggccggatgggagaagg

SEQ ID NO: 4829 - RNA, 21 nt, synthetic construct
  misc_feature 1..21: note = Synthetic
  source 1..21: mol_type = other RNA
tcgggccggatgggagaaggg

SEQ ID NO: 4830 - RNA, 21 nt, synthetic construct
  misc_feature 1..21: note = Synthetic
  source 1..21: mol_type = other RNA
cgggccggatgggagaaggga

SEQ ID NO: 4831 - RNA, 21 nt, synthetic construct
  misc_feature 1..21: note = Synthetic
  source 1..21: mol_type = other RNA
gggccggatgggagaagggag

SEQ ID NO: 4832 - RNA, 21 nt, synthetic construct
  misc_feature 1..21: note = Synthetic
  source 1..21: mol_type = other RNA
ggccggatgggagaagggagt

SEQ ID NO: 4833 - RNA, 21 nt, synthetic construct
  misc_feature 1..21: note = Synthetic
  source 1..21: mol_type = other RNA
gccggatgggagaagggagtg

SEQ ID NO: 4834 - RNA, 21 nt, synthetic construct
  misc_feature 1..21: note = Synthetic
  source 1..21: mol_type = other RNA
ccggatgggagaagggagtgg

SEQ ID NO: 4835 - RNA, 21 nt, synthetic construct
  misc_feature 1..21: note = Synthetic
  source 1..21: mol_type = other RNA
cggatgggagaagggagtggg

SEQ ID NO: 4836 - RNA, 21 nt, synthetic construct
  misc_feature 1..21: note = Synthetic
  source 1..21: mol_type = other RNA
ggatgggagaagggagtgggg

SEQ ID NO: 4837 - RNA, 21 nt, synthetic construct
  misc_feature 1..21: note = Synthetic
  source 1..21: mol_type = other RNA
gatgggagaagggagtggggc

SEQ ID NO: 4838 - RNA, 21 nt, synthetic construct
  misc_feature 1..21: note = Synthetic
  source 1..21: mol_type = other RNA
atgggagaagggagtggggct

SEQ ID NO: 4839 - RNA, 21 nt, synthetic construct
  misc_feature 1..21: note = Synthetic
  source 1..21: mol_type = other RNA
tgggagaagggagtggggctc

SEQ ID NO: 4840 - RNA, 21 nt, synthetic construct
  misc_feature 1..21: note = Synthetic
  source 1..21: mol_type = other RNA
gggagaagggagtggggctcc

SEQ ID NO: 4841 - RNA, 21 nt, synthetic construct
  misc_feature 1..21: note = Synthetic
  source 1..21: mol_type = other RNA
ggagaagggagtggggctcca

SEQ ID NO: 4842 - RNA, 21 nt, synthetic construct
  misc_feature 1..21: note = Synthetic
  source 1..21: mol_type = other RNA
gagaagggagtggggctccag

SEQ ID NO: 4843 - RNA, 21 nt, synthetic construct
  misc_feature 1..21: note = Synthetic
  source 1..21: mol_type = other RNA
agaagggagtggggctccagt

SEQ ID NO: 4844 - RNA, 21 nt, synthetic construct
  misc_feature 1..21: note = Synthetic
  source 1..21: mol_type = other RNA
gaagggagtggggctccagtg

SEQ ID NO: 4845 - RNA, 21 nt, synthetic construct
  misc_feature 1..21: note = Synthetic
  source 1..21: mol_type = other RNA
aagggagtggggctccagtgt

SEQ ID NO: 4846 - RNA, 21 nt, synthetic construct
  misc_feature 1..21: note = Synthetic
  source 1..21: mol_type = other RNA
agggagtggggctccagtgtt

SEQ ID NO: 4847 - RNA, 21 nt, synthetic construct
  misc_feature 1..21: note = Synthetic
  source 1..21: mol_type = other RNA
gggagtggggctccagtgtta

SEQ ID NO: 4848 - RNA, 21 nt, synthetic construct
  misc_feature 1..21: note = Synthetic
  source 1..21: mol_type = other RNA
ggagtggggctccagtgttaa

SEQ ID NO: 4849 - RNA, 21 nt, synthetic construct
  misc_feature 1..21: note = Synthetic
  source 1..21: mol_type = other RNA
gagtggggctccagtgttaag

SEQ ID NO: 4850 - RNA, 21 nt, synthetic construct
  misc_feature 1..21: note = Synthetic
  source 1..21: mol_type = other RNA
agtggggctccagtgttaagg

SEQ ID NO: 4851 - RNA, 21 nt, synthetic construct
  misc_feature 1..21: note = Synthetic
  source 1..21: mol_type = other RNA
gtggggctccagtgttaaggg

SEQ ID NO: 4852 - RNA, 21 nt, synthetic construct
  misc_feature 1..21: note = Synthetic
  source 1..21: mol_type = other RNA
tggggctccagtgttaagggg

SEQ ID NO: 4853 - RNA, 21 nt, synthetic construct
  misc_feature 1..21: note = Synthetic
  source 1..21: mol_type = other RNA
ggggctccagtgttaaggggg

SEQ ID NO: 4854 - RNA, 21 nt, synthetic construct
  misc_feature 1..21: note = Synthetic
  source 1..21: mol_type = other RNA
gggctccagtgttaagggggg

SEQ ID NO: 4855 - RNA, 21 nt, synthetic construct
  misc_feature 1..21: note = Synthetic
  source 1..21: mol_type = other RNA
ggctccagtgttaaggggggg

SEQ ID NO: 4856 - RNA, 21 nt, synthetic construct
  misc_feature 1..21: note = Synthetic
  source 1..21: mol_type = other RNA
gctccagtgttaagggggggc

SEQ ID NO: 4857 - RNA, 21 nt, synthetic construct
  misc_feature 1..21: note = Synthetic
  source 1..21: mol_type = other RNA
ctccagtgttaagggggggcc

SEQ ID NO: 4858 - RNA, 21 nt, synthetic construct
  misc_feature 1..21: note = Synthetic
  source 1..21: mol_type = other RNA
tccagtgttaagggggggcca

SEQ ID NO: 4859 - RNA, 21 nt, synthetic construct
  misc_feature 1..21: note = Synthetic
  source 1..21: mol_type = other RNA
ccagtgttaagggggggccag

SEQ ID NO: 4860 - RNA, 21 nt, synthetic construct
  misc_feature 1..21: note = Synthetic
  source 1..21: mol_type = other RNA
cagtgttaagggggggccaga

SEQ ID NO: 4861 - RNA, 21 nt, synthetic construct
  misc_feature 1..21: note = Synthetic
  source 1..21: mol_type = other RNA
agtgttaagggggggccagat

SEQ ID NO: 4862 - RNA, 21 nt, synthetic construct
  misc_feature 1..21: note = Synthetic
  source 1..21: mol_type = other RNA
gtgttaagggggggccagata

SEQ ID NO: 4863 - RNA, 21 nt, synthetic construct
  misc_feature 1..21: note = Synthetic
  source 1..21: mol_type = other RNA
tgttaagggggggccagatat

SEQ ID NO: 4864 - RNA, 21 nt, synthetic construct
  misc_feature 1..21: note = Synthetic
  source 1..21: mol_type = other RNA
gttaagggggggccagatatc

SEQ ID NO: 4865 - RNA, 21 nt, synthetic construct
  misc_feature 1..21: note = Synthetic
  source 1..21: mol_type = other RNA
ttaagggggggccagatatca

SEQ ID NO: 4866 - RNA, 21 nt, synthetic construct
  misc_feature 1..21: note = Synthetic
  source 1..21: mol_type = other RNA
taagggggggccagatatcat

SEQ ID NO: 4867 - RNA, 21 nt, synthetic construct
  misc_feature 1..21: note = Synthetic
  source 1..21: mol_type = other RNA
aagggggggccagatatcatt

SEQ ID NO: 4868 - RNA, 21 nt, synthetic construct
  misc_feature 1..21: note = Synthetic
  source 1..21: mol_type = other RNA
agggggggccagatatcattt

SEQ ID NO: 4869 - RNA, 21 nt, synthetic construct
  misc_feature 1..21: note = Synthetic
  source 1..21: mol_type = other RNA
gggggggccagatatcatttc

SEQ ID NO: 4870 - RNA, 21 nt, synthetic construct
  misc_feature 1..21: note = Synthetic
  source 1..21: mol_type = other RNA
ggggggccagatatcatttct

SEQ ID NO: 4871 - RNA, 21 nt, synthetic construct
  misc_feature 1..21: note = Synthetic
  source 1..21: mol_type = other RNA
gggggccagatatcatttctt

SEQ ID NO: 4872 - RNA, 21 nt, synthetic construct
  misc_feature 1..21: note = Synthetic
  source 1..21: mol_type = other RNA
ggggccagatatcatttcttt

SEQ ID NO: 4873 - RNA, 21 nt, synthetic construct
  misc_feature 1..21: note = Synthetic
  source 1..21: mol_type = other RNA
gggccagatatcatttctttt

SEQ ID NO: 4874 - RNA, 21 nt, synthetic construct
  misc_feature 1..21: note = Synthetic
  source 1..21: mol_type = other RNA
ggccagatatcatttcttttt

SEQ ID NO: 4875 - RNA, 21 nt, synthetic construct
  misc_feature 1..21: note = Synthetic
  source 1..21: mol_type = other RNA
gccagatatcatttctttttt

SEQ ID NO: 4876 - RNA, 21 nt, synthetic construct
  misc_feature 1..21: note = Synthetic
  source 1..21: mol_type = other RNA
ccagatatcatttcttttttt

SEQ ID NO: 4877 - RNA, 21 nt, synthetic construct
  misc_feature 1..21: note = Synthetic
  source 1..21: mol_type = other RNA
cagatatcatttctttttttt

SEQ ID NO: 4878 - RNA, 21 nt, synthetic construct
  misc_feature 1..21: note = Synthetic
  source 1..21: mol_type = other RNA
agatatcatttcttttttttt

SEQ ID NO: 4879 - RNA, 21 nt, synthetic construct
  misc_feature 1..21: note = Synthetic
  source 1..21: mol_type = other RNA
gatatcatttctttttttttt

SEQ ID NO: 4880 - RNA, 21 nt, synthetic construct
  misc_feature 1..21: note = Synthetic
  source 1..21: mol_type = other RNA
atatcatttcttttttttttt

SEQ ID NO: 4881 - RNA, 21 nt, synthetic construct
  misc_feature 1..21: note = Synthetic
  source 1..21: mol_type = other RNA
tatcatttctttttttttttt

SEQ ID NO: 4882 - RNA, 21 nt, synthetic construct
  misc_feature 1..21: note = Synthetic
  source 1..21: mol_type = other RNA
atcatttcttttttttttttt

SEQ ID NO: 4883 - RNA, 21 nt, synthetic construct
  misc_feature 1..21: note = Synthetic
  source 1..21: mol_type = other RNA
tcatttctttttttttttttt

SEQ ID NO: 4884 - RNA, 21 nt, synthetic construct
  misc_feature 1..21: note = Synthetic
  source 1..21: mol_type = other RNA
catttcttttttttttttttt

SEQ ID NO: 4885 - RNA, 21 nt, synthetic construct
  misc_feature 1..21: note = Synthetic
  source 1..21: mol_type = other RNA
atttctttttttttttttttt

SEQ ID NO: 4886 - RNA, 21 nt, synthetic construct
  misc_feature 1..21: note = Synthetic
  source 1..21: mol_type = other RNA
tttcttttttttttttttttt

SEQ ID NO: 4887 - RNA, 21 nt, synthetic construct
  misc_feature 1..21: note = Synthetic
  source 1..21: mol_type = other RNA
ttctttttttttttttttttt

SEQ ID NO: 4888 - RNA, 21 nt, synthetic construct
  misc_feature 1..21: note = Synthetic
  source 1..21: mol_type = other RNA
tcttttttttttttttttttt

SEQ ID NO: 4889 - RNA, 21 nt, synthetic construct
  misc_feature 1..21: note = Synthetic
  source 1..21: mol_type = other RNA
ctttttttttttttttttttt

SEQ ID NO: 4890 - RNA, 21 nt, synthetic construct
  misc_feature 1..21: note = Synthetic
  source 1..21: mol_type = other RNA
ttttttttttttttttttttt

SEQ ID NO: 4891 - RNA, 21 nt, synthetic construct
  misc_feature 1..21: note = Synthetic
  source 1..21: mol_type = other RNA
ttttttttttttttttttttg

SEQ ID NO: 4892 - RNA, 21 nt, synthetic construct
  misc_feature 1..21: note = Synthetic
  source 1..21: mol_type = other RNA
tttttttttttttttttttga

SEQ ID NO: 4893 - RNA, 21 nt, synthetic construct
  misc_feature 1..21: note = Synthetic
  source 1..21: mol_type = other RNA
ttttttttttttttttttgac

SEQ ID NO: 4894 - RNA, 21 nt, synthetic construct
  misc_feature 1..21: note = Synthetic
  source 1..21: mol_type = other RNA
tttttttttttttttttgacg

SEQ ID NO: 4895 - RNA, 21 nt, synthetic construct
  misc_feature 1..21: note = Synthetic
  source 1..21: mol_type = other RNA
ttttttttttttttttgacgg

SEQ ID NO: 4896 - RNA, 21 nt, synthetic construct
  misc_feature 1..21: note = Synthetic
  source 1..21: mol_type = other RNA
tttttttttttttttgacgga

SEQ ID NO: 4897 - RNA, 21 nt, synthetic construct
  misc_feature 1..21: note = Synthetic
  source 1..21: mol_type = other RNA
ttttttttttttttgacggag

SEQ ID NO: 4898 - RNA, 21 nt, synthetic construct
  misc_feature 1..21: note = Synthetic
  source 1..21: mol_type = other RNA
tttttttttttttgacggagt

SEQ ID NO: 4899 - RNA, 21 nt, synthetic construct
  misc_feature 1..21: note = Synthetic
  source 1..21: mol_type = other RNA
ttttttttttttgacggagtc

SEQ ID NO: 4900 - RNA, 21 nt, synthetic construct
  misc_feature 1..21: note = Synthetic
  source 1..21: mol_type = other RNA
tttttttttttgacggagtct

SEQ ID NO: 4901 - RNA, 21 nt, synthetic construct
  misc_feature 1..21: note = Synthetic
  source 1..21: mol_type = other RNA
ttttttttttgacggagtctt

SEQ ID NO: 4902 - RNA, 21 nt, synthetic construct
  misc_feature 1..21: note = Synthetic
  source 1..21: mol_type = other RNA
tttttttttgacggagtcttg

SEQ ID NO: 4903 - RNA, 21 nt, synthetic construct
  misc_feature 1..21: note = Synthetic
  source 1..21: mol_type = other RNA
ttttttttgacggagtcttgc

SEQ ID NO: 4904 - RNA, 21 nt, synthetic construct
  misc_feature 1..21: note = Synthetic
  source 1..21: mol_type = other RNA
tttttttgacggagtcttgct

SEQ ID NO: 4905 - RNA, 21 nt, synthetic construct
  misc_feature 1..21: note = Synthetic
  source 1..21: mol_type = other RNA
ttttttgacggagtcttgctc

SEQ ID NO: 4906 - RNA, 21 nt, synthetic construct
  misc_feature 1..21: note = Synthetic
  source 1..21: mol_type = other RNA
tttttgacggagtcttgctct

SEQ ID NO: 4907 - RNA, 21 nt, synthetic construct
  misc_feature 1..21: note = Synthetic
  source 1..21: mol_type = other RNA
ttttgacggagtcttgctctg

SEQ ID NO: 4908 - RNA, 21 nt, synthetic construct
  misc_feature 1..21: note = Synthetic
  source 1..21: mol_type = other RNA
tttgacggagtcttgctctgt

SEQ ID NO: 4909 - RNA, 21 nt, synthetic construct
  misc_feature 1..21: note = Synthetic
  source 1..21: mol_type = other RNA
ttgacggagtcttgctctgtc

SEQ ID NO: 4910 - RNA, 21 nt, synthetic construct
  misc_feature 1..21: note = Synthetic
  source 1..21: mol_type = other RNA
tgacggagtcttgctctgtca

SEQ ID NO: 4911 - RNA, 21 nt, synthetic construct
  misc_feature 1..21: note = Synthetic
  source 1..21: mol_type = other RNA
gacggagtcttgctctgtcac

SEQ ID NO: 4912 - RNA, 21 nt, synthetic construct
  misc_feature 1..21: note = Synthetic
  source 1..21: mol_type = other RNA
acggagtcttgctctgtcact

SEQ ID NO: 4913 - RNA, 21 nt, synthetic construct
  misc_feature 1..21: note = Synthetic
  source 1..21: mol_type = other RNA
cggagtcttgctctgtcactc

SEQ ID NO: 4914 - RNA, 21 nt, synthetic construct
  misc_feature 1..21: note = Synthetic
  source 1..21: mol_type = other RNA
ggagtcttgctctgtcactca

SEQ ID NO: 4915 - RNA, 21 nt, synthetic construct
  misc_feature 1..21: note = Synthetic
  source 1..21: mol_type = other RNA
gagtcttgctctgtcactcag

SEQ ID NO: 4916 - RNA, 21 nt, synthetic construct
  misc_feature 1..21: note = Synthetic
  source 1..21: mol_type = other RNA
agtcttgctctgtcactcagg

SEQ ID NO: 4917 - RNA, 21 nt, synthetic construct
  misc_feature 1..21: note = Synthetic
  source 1..21: mol_type = other RNA
gtcttgctctgtcactcaggc

SEQ ID NO: 4918 - RNA, 21 nt, synthetic construct
  misc_feature 1..21: note = Synthetic
  source 1..21: mol_type = other RNA
tcttgctctgtcactcaggct

SEQ ID NO: 4919 - RNA, 21 nt, synthetic construct
  misc_feature 1..21: note = Synthetic
  source 1..21: mol_type = other RNA
cttgctctgtcactcaggctg

SEQ ID NO: 4920 - RNA, 21 nt, synthetic construct
  misc_feature 1..21: note = Synthetic
  source 1..21: mol_type = other RNA
ttgctctgtcactcaggctgg

SEQ ID NO: 4921 - RNA, 21 nt, synthetic construct
  misc_feature 1..21: note = Synthetic
  source 1..21: mol_type = other RNA
tgctctgtcactcaggctgga

SEQ ID NO: 4922 - RNA, 21 nt, synthetic construct
  misc_feature 1..21: note = Synthetic
  source 1..21: mol_type = other RNA
gctctgtcactcaggctggag

SEQ ID NO: 4923 - RNA, 21 nt, synthetic construct
  misc_feature 1..21: note = Synthetic
  source 1..21: mol_type = other RNA
ctctgtcactcaggctggagt

SEQ ID NO: 4924 - RNA, 21 nt, synthetic construct
  misc_feature 1..21: note = Synthetic
  source 1..21: mol_type = other RNA
tctgtcactcaggctggagtg

SEQ ID NO: 4925 - RNA, 21 nt, synthetic construct
  misc_feature 1..21: note = Synthetic
  source 1..21: mol_type = other RNA
ctgtcactcaggctggagtgc

SEQ ID NO: 4926 - RNA, 21 nt, synthetic construct
  misc_feature 1..21: note = Synthetic
  source 1..21: mol_type = other RNA
tgtcactcaggctggagtgca

SEQ ID NO: 4927 - RNA, 21 nt, synthetic construct
  misc_feature 1..21: note = Synthetic
  source 1..21: mol_type = other RNA
gtcactcaggctggagtgcag

SEQ ID NO: 4928 - RNA, 21 nt, synthetic construct
  misc_feature 1..21: note = Synthetic
  source 1..21: mol_type = other RNA
tcactcaggctggagtgcagt

SEQ ID NO: 4929 - RNA, 21 nt, synthetic construct
  misc_feature 1..21: note = Synthetic
  source 1..21: mol_type = other RNA
cactcaggctggagtgcagtg

SEQ ID NO: 4930 - RNA, 21 nt, synthetic construct
  misc_feature 1..21: note = Synthetic
  source 1..21: mol_type = other RNA
actcaggctggagtgcagtgg

SEQ ID NO: 4931 - RNA, 21 nt, synthetic construct
  misc_feature 1..21: note = Synthetic
  source 1..21: mol_type = other RNA
ctcaggctggagtgcagtggc

SEQ ID NO: 4932 - RNA, 21 nt, synthetic construct
  misc_feature 1..21: note = Synthetic
  source 1..21: mol_type = other RNA
tcaggctggagtgcagtggca

SEQ ID NO: 4933 - RNA, 21 nt, synthetic construct
  misc_feature 1..21: note = Synthetic
  source 1..21: mol_type = other RNA
caggctggagtgcagtggcac

SEQ ID NO: 4934 - RNA, 21 nt, synthetic construct
  misc_feature 1..21: note = Synthetic
  source 1..21: mol_type = other RNA
aggctggagtgcagtggcacg

SEQ ID NO: 4935 - RNA, 21 nt, synthetic construct
  misc_feature 1..21: note = Synthetic
  source 1..21: mol_type = other RNA
ggctggagtgcagtggcacga

SEQ ID NO: 4936 - RNA, 21 nt, synthetic construct
  misc_feature 1..21: note = Synthetic
  source 1..21: mol_type = other RNA
gctggagtgcagtggcacgat

SEQ ID NO: 4937 - RNA, 21 nt, synthetic construct
  misc_feature 1..21: note = Synthetic
  source 1..21: mol_type = other RNA
ctggagtgcagtggcacgatc

SEQ ID NO: 4938 - RNA, 21 nt, synthetic construct
  misc_feature 1..21: note = Synthetic
  source 1..21: mol_type = other RNA
tggagtgcagtggcacgatct

SEQ ID NO: 4939 - RNA, 21 nt, synthetic construct
  misc_feature 1..21: note = Synthetic
  source 1..21: mol_type = other RNA
ggagtgcagtggcacgatctt

SEQ ID NO: 4940 - RNA, 21 nt, synthetic construct
  misc_feature 1..21: note = Synthetic
  source 1..21: mol_type = other RNA
gagtgcagtggcacgatcttg

SEQ ID NO: 4941 - RNA, 21 nt, synthetic construct
  misc_feature 1..21: note = Synthetic
  source 1..21: mol_type = other RNA
agtgcagtggcacgatcttgg

SEQ ID NO: 4942 - RNA, 21 nt, synthetic construct
  misc_feature 1..21: note = Synthetic
  source 1..21: mol_type = other RNA
gtgcagtggcacgatcttggc

SEQ ID NO: 4943 - RNA, 21 nt, synthetic construct
  misc_feature 1..21: note = Synthetic
  source 1..21: mol_type = other RNA
tgcagtggcacgatcttggct

SEQ ID NO: 4944 - RNA, 21 nt, synthetic construct
  misc_feature 1..21: note = Synthetic
  source 1..21: mol_type = other RNA
gcagtggcacgatcttggctc

SEQ ID NO: 4945 - RNA, 21 nt, synthetic construct
  misc_feature 1..21: note = Synthetic
  source 1..21: mol_type = other RNA
cagtggcacgatcttggctca

SEQ ID NO: 4946 - RNA, 21 nt, synthetic construct
  misc_feature 1..21: note = Synthetic
  source 1..21: mol_type = other RNA
agtggcacgatcttggctcac

SEQ ID NO: 4947 - RNA, 21 nt, synthetic construct
  misc_feature 1..21: note = Synthetic
  source 1..21: mol_type = other RNA
gtggcacgatcttggctcact

SEQ ID NO: 4948 - RNA, 21 nt, synthetic construct
  misc_feature 1..21: note = Synthetic
  source 1..21: mol_type = other RNA
tggcacgatcttggctcactg

SEQ ID NO: 4949 - RNA, 21 nt, synthetic construct
  misc_feature 1..21: note = Synthetic
  source 1..21: mol_type = other RNA
ggcacgatcttggctcactgc

SEQ ID NO: 4950 - RNA, 21 nt, synthetic construct
  misc_feature 1..21: note = Synthetic
  source 1..21: mol_type = other RNA
gcacgatcttggctcactgca

SEQ ID NO: 4951 - RNA, 21 nt, synthetic construct
  misc_feature 1..21: note = Synthetic
  source 1..21: mol_type = other RNA
cacgatcttggctcactgcag

SEQ ID NO: 4952 - RNA, 21 nt, synthetic construct
  misc_feature 1..21: note = Synthetic
  source 1..21: mol_type = other RNA
acgatcttggctcactgcagc

SEQ ID NO: 4953 - RNA, 21 nt, synthetic construct
  misc_feature 1..21: note = Synthetic
  source 1..21: mol_type = other RNA
cgatcttggctcactgcagcc

SEQ ID NO: 4954 - RNA, 21 nt, synthetic construct
  misc_feature 1..21: note = Synthetic
  source 1..21: mol_type = other RNA
gatcttggctcactgcagcct

SEQ ID NO: 4955 - RNA, 21 nt, synthetic construct
  misc_feature 1..21: note = Synthetic
  source 1..21: mol_type = other RNA
atcttggctcactgcagcctc

SEQ ID NO: 4956 - RNA, 21 nt, synthetic construct
  misc_feature 1..21: note = Synthetic
  source 1..21: mol_type = other RNA
tcttggctcactgcagcctcc

SEQ ID NO: 4957 - RNA, 21 nt, synthetic construct
  misc_feature 1..21: note = Synthetic
  source 1..21: mol_type = other RNA
cttggctcactgcagcctcca

SEQ ID NO: 4958 - RNA, 21 nt, synthetic construct
  misc_feature 1..21: note = Synthetic
  source 1..21: mol_type = other RNA
ttggctcactgcagcctccac

SEQ ID NO: 4959 - RNA, 21 nt, synthetic construct
  misc_feature 1..21: note = Synthetic
  source 1..21: mol_type = other RNA
tggctcactgcagcctccacc

SEQ ID NO: 4960 - RNA, 21 nt, synthetic construct
  misc_feature 1..21: note = Synthetic
  source 1..21: mol_type = other RNA
ggctcactgcagcctccacct

SEQ ID NO: 4961 - RNA, 21 nt, synthetic construct
  misc_feature 1..21: note = Synthetic
  source 1..21: mol_type = other RNA
gctcactgcagcctccacctc

SEQ ID NO: 4962 - RNA, 21 nt, synthetic construct
  misc_feature 1..21: note = Synthetic
  source 1..21: mol_type = other RNA
ctcactgcagcctccacctcc

SEQ ID NO: 4963 - RNA, 21 nt, synthetic construct
  misc_feature 1..21: note = Synthetic
  source 1..21: mol_type = other RNA
tcactgcagcctccacctccc

SEQ ID NO: 4964 - RNA, 21 nt, synthetic construct
  misc_feature 1..21: note = Synthetic
  source 1..21: mol_type = other RNA
cactgcagcctccacctccca

SEQ ID NO: 4965 - RNA, 21 nt, synthetic construct
  misc_feature 1..21: note = Synthetic
  source 1..21: mol_type = other RNA
actgcagcctccacctcccag

SEQ ID NO: 4966 - RNA, 21 nt, synthetic construct
  misc_feature 1..21: note = Synthetic
  source 1..21: mol_type = other RNA
ctgcagcctccacctcccagg

SEQ ID NO: 4967 - RNA, 21 nt, synthetic construct
  misc_feature 1..21: note = Synthetic
  source 1..21: mol_type = other RNA
tgcagcctccacctcccaggt

SEQ ID NO: 4968 - RNA, 21 nt, synthetic construct
  misc_feature 1..21: note = Synthetic
  source 1..21: mol_type = other RNA
gcagcctccacctcccaggtt

SEQ ID NO: 4969 - RNA, 21 nt, synthetic construct
  misc_feature 1..21: note = Synthetic
  source 1..21: mol_type = other RNA
cagcctccacctcccaggttt

SEQ ID NO: 4970 - RNA, 21 nt, synthetic construct
  misc_feature 1..21: note = Synthetic
  source 1..21: mol_type = other RNA
agcctccacctcccaggttta

SEQ ID NO: 4971 - RNA, 21 nt, synthetic construct
  misc_feature 1..21: note = Synthetic
  source 1..21: mol_type = other RNA
gcctccacctcccaggtttaa

SEQ ID NO: 4972 - RNA, 21 nt, synthetic construct
  misc_feature 1..21: note = Synthetic
  source 1..21: mol_type = other RNA
cctccacctcccaggtttaag

SEQ ID NO: 4973 - RNA, 21 nt, synthetic construct
  misc_feature 1..21: note = Synthetic
  source 1..21: mol_type = other RNA
ctccacctcccaggtttaagc

SEQ ID NO: 4974 - RNA, 21 nt, synthetic construct
  misc_feature 1..21: note = Synthetic
  source 1..21: mol_type = other RNA
tccacctcccaggtttaagca

SEQ ID NO: 4975 - RNA, 21 nt, synthetic construct
  misc_feature 1..21: note = Synthetic
  source 1..21: mol_type = other RNA
ccacctcccaggtttaagcaa

SEQ ID NO: 4976 - RNA, 21 nt, synthetic construct
  misc_feature 1..21: note = Synthetic
  source 1..21: mol_type = other RNA
cacctcccaggtttaagcaat

SEQ ID NO: 4977 - RNA, 21 nt, synthetic construct
  misc_feature 1..21: note = Synthetic
  source 1..21: mol_type = other RNA
acctcccaggtttaagcaatt

SEQ ID NO: 4978 - RNA, 21 nt, synthetic construct
  misc_feature 1..21: note = Synthetic
  source 1..21: mol_type = other RNA
cctcccaggtttaagcaattc

SEQ ID NO: 4979 - RNA, 21 nt, synthetic construct
  misc_feature 1..21: note = Synthetic
  source 1..21: mol_type = other RNA
ctcccaggtttaagcaattct

SEQ ID NO: 4980 - RNA, 21 nt, synthetic construct
  misc_feature 1..21: note = Synthetic
  source 1..21: mol_type = other RNA
tcccaggtttaagcaattctc

SEQ ID NO: 4981 - RNA, 21 nt, synthetic construct
  misc_feature 1..21: note = Synthetic
  source 1..21: mol_type = other RNA
cccaggtttaagcaattctcc

SEQ ID NO: 4982 - RNA, 21 nt, synthetic construct
  misc_feature 1..21: note = Synthetic
  source 1..21: mol_type = other RNA
ccaggtttaagcaattctcct

SEQ ID NO: 4983 - RNA, 21 nt, synthetic construct
  misc_feature 1..21: note = Synthetic
  source 1..21: mol_type = other RNA
caggtttaagcaattctcctg

SEQ ID NO: 4984 - RNA, 21 nt, synthetic construct
  misc_feature 1..21: note = Synthetic
  source 1..21: mol_type = other RNA
aggtttaagcaattctcctgc

SEQ ID NO: 4985 - RNA, 21 nt, synthetic construct
  misc_feature 1..21: note = Synthetic
  source 1..21: mol_type = other RNA
ggtttaagcaattctcctgcc

SEQ ID NO: 4986 - RNA, 21 nt, synthetic construct
  misc_feature 1..21: note = Synthetic
  source 1..21: mol_type = other RNA
gtttaagcaattctcctgcct

SEQ ID NO: 4987 - RNA, 21 nt, synthetic construct
  misc_feature 1..21: note = Synthetic
  source 1..21: mol_type = other RNA
tttaagcaattctcctgcctc

SEQ ID NO: 4988 - RNA, 21 nt, synthetic construct
  misc_feature 1..21: note = Synthetic
  source 1..21: mol_type = other RNA
ttaagcaattctcctgcctca

SEQ ID NO: 4989 - RNA, 21 nt, synthetic construct
  misc_feature 1..21: note = Synthetic
  source 1..21: mol_type = other RNA
taagcaattctcctgcctcag

SEQ ID NO: 4990 - RNA, 21 nt, synthetic construct
  misc_feature 1..21: note = Synthetic
  source 1..21: mol_type = other RNA
aagcaattctcctgcctcagc

SEQ ID NO: 4991 - RNA, 21 nt, synthetic construct
  misc_feature 1..21: note = Synthetic
  source 1..21: mol_type = other RNA
agcaattctcctgcctcagcc

SEQ ID NO: 4992 - RNA, 21 nt, synthetic construct
  misc_feature 1..21: note = Synthetic
  source 1..21: mol_type = other RNA
gcaattctcctgcctcagcct

SEQ ID NO: 4993 - RNA, 21 nt, synthetic construct
  misc_feature 1..21: note = Synthetic
  source 1..21: mol_type = other RNA
caattctcctgcctcagcctc

SEQ ID NO: 4994 - RNA, 21 nt, synthetic construct
  misc_feature 1..21: note = Synthetic
  source 1..21: mol_type = other RNA
aattctcctgcctcagcctcc

SEQ ID NO: 4995 - RNA, 21 nt, synthetic construct
  misc_feature 1..21: note = Synthetic
  source 1..21: mol_type = other RNA
attctcctgcctcagcctccc

SEQ ID NO: 4996 - RNA, 21 nt, synthetic construct
  misc_feature 1..21: note = Synthetic
  source 1..21: mol_type = other RNA
ttctcctgcctcagcctcccg

SEQ ID NO: 4997 - RNA, 21 nt, synthetic construct
  misc_feature 1..21: note = Synthetic
  source 1..21: mol_type = other RNA
tctcctgcctcagcctcccga

SEQ ID NO: 4998 - RNA, 21 nt, synthetic construct
  misc_feature 1..21: note = Synthetic
  source 1..21: mol_type = other RNA
ctcctgcctcagcctcccgag

SEQ ID NO: 4999 - RNA, 21 nt, synthetic construct
  misc_feature 1..21: note = Synthetic
  source 1..21: mol_type = other RNA
tcctgcctcagcctcccgagt

SEQ ID NO: 5000 - RNA, 21 nt, synthetic construct
  misc_feature 1..21: note = Synthetic
  source 1..21: mol_type = other RNA
cctgcctcagcctcccgagta

SEQ ID NO: 5001 - RNA, 21 nt, synthetic construct
  misc_feature 1..21: note = Synthetic
  source 1..21: mol_type = other RNA
ctgcctcagcctcccgagtag

SEQ ID NO: 5002 - RNA, 21 nt, synthetic construct
  misc_feature 1..21: note = Synthetic
  source 1..21: mol_type = other RNA
tgcctcagcctcccgagtagc

SEQ ID NO: 5003 - RNA, 21 nt, synthetic construct
  misc_feature 1..21: note = Synthetic
  source 1..21: mol_type = other RNA
gcctcagcctcccgagtagct

SEQ ID NO: 5004 - RNA, 21 nt, synthetic construct
  misc_feature 1..21: note = Synthetic
  source 1..21: mol_type = other RNA
cctcagcctcccgagtagctg

SEQ ID NO: 5005 - RNA, 21 nt, synthetic construct
  misc_feature 1..21: note = Synthetic
  source 1..21: mol_type = other RNA
ctcagcctcccgagtagctgg

SEQ ID NO: 5006 - RNA, 21 nt, synthetic construct
  misc_feature 1..21: note = Synthetic
  source 1..21: mol_type = other RNA
tcagcctcccgagtagctggg

SEQ ID NO: 5007 - RNA, 21 nt, synthetic construct
  misc_feature 1..21: note = Synthetic
  source 1..21: mol_type = other RNA
cagcctcccgagtagctggga

SEQ ID NO: 5008 - RNA, 21 nt, synthetic construct
  misc_feature 1..21: note = Synthetic
  source 1..21: mol_type = other RNA
agcctcccgagtagctgggat

SEQ ID NO: 5009 - RNA, 21 nt, synthetic construct
  misc_feature 1..21: note = Synthetic
  source 1..21: mol_type = other RNA
gcctcccgagtagctgggatt

SEQ ID NO: 5010 - RNA, 21 nt, synthetic construct
  misc_feature 1..21: note = Synthetic
  source 1..21: mol_type = other RNA
cctcccgagtagctgggatta

SEQ ID NO: 5011 - RNA, 21 nt, synthetic construct
  misc_feature 1..21: note = Synthetic
  source 1..21: mol_type = other RNA
ctcccgagtagctgggattac

SEQ ID NO: 5012 - RNA, 21 nt, synthetic construct
  misc_feature 1..21: note = Synthetic
  source 1..21: mol_type = other RNA
tcccgagtagctgggattaca

SEQ ID NO: 5013 - RNA, 21 nt, synthetic construct
  misc_feature 1..21: note = Synthetic
  source 1..21: mol_type = other RNA
cccgagtagctgggattacag

SEQ ID NO: 5014 - RNA, 21 nt, synthetic construct
  misc_feature 1..21: note = Synthetic
  source 1..21: mol_type = other RNA
ccgagtagctgggattacagg

SEQ ID NO: 5015 - RNA, 21 nt, synthetic construct
  misc_feature 1..21: note = Synthetic
  source 1..21: mol_type = other RNA
cgagtagctgggattacaggc

SEQ ID NO: 5016 - RNA, 21 nt, synthetic construct
  misc_feature 1..21: note = Synthetic
  source 1..21: mol_type = other RNA
gagtagctgggattacaggca

SEQ ID NO: 5017 - RNA, 21 nt, synthetic construct
  misc_feature 1..21: note = Synthetic
  source 1..21: mol_type = other RNA
agtagctgggattacaggcat

SEQ ID NO: 5018 - RNA, 21 nt, synthetic construct
  misc_feature 1..21: note = Synthetic
  source 1..21: mol_type = other RNA
gtagctgggattacaggcata

SEQ ID NO: 5019 - RNA, 21 nt, synthetic construct
  misc_feature 1..21: note = Synthetic
  source 1..21: mol_type = other RNA
tagctgggattacaggcatac

SEQ ID NO: 5020 - RNA, 21 nt, synthetic construct
  misc_feature 1..21: note = Synthetic
  source 1..21: mol_type = other RNA
agctgggattacaggcatacg

SEQ ID NO: 5021 - RNA, 21 nt, synthetic construct
  misc_feature 1..21: note = Synthetic
  source 1..21: mol_type = other RNA
gctgggattacaggcatacgc

SEQ ID NO: 5022 - RNA, 21 nt, synthetic construct
  misc_feature 1..21: note = Synthetic
  source 1..21: mol_type = other RNA
ctgggattacaggcatacgcc

SEQ ID NO: 5023 - RNA, 21 nt, synthetic construct
  misc_feature 1..21: note = Synthetic
  source 1..21: mol_type = other RNA
tgggattacaggcatacgcca

SEQ ID NO: 5024 - RNA, 21 nt, synthetic construct
  misc_feature 1..21: note = Synthetic
  source 1..21: mol_type = other RNA
gggattacaggcatacgccac

SEQ ID NO: 5025 - RNA, 21 nt, synthetic construct
  misc_feature 1..21: note = Synthetic
  source 1..21: mol_type = other RNA
ggattacaggcatacgccacc

SEQ ID NO: 5026 - RNA, 21 nt, synthetic construct
  misc_feature 1..21: note = Synthetic
  source 1..21: mol_type = other RNA
gattacaggcatacgccacca

SEQ ID NO: 5027 - RNA, 21 nt, synthetic construct
  misc_feature 1..21: note = Synthetic
  source 1..21: mol_type = other RNA
attacaggcatacgccaccaa

SEQ ID NO: 5028 - RNA, 21 nt, synthetic construct
  misc_feature 1..21: note = Synthetic
  source 1..21: mol_type = other RNA
ttacaggcatacgccaccaaa

SEQ ID NO: 5029 - RNA, 21 nt, synthetic construct
  misc_feature 1..21: note = Synthetic
  source 1..21: mol_type = other RNA
tacaggcatacgccaccaaac

SEQ ID NO: 5030 - RNA, 21 nt, synthetic construct
  misc_feature 1..21: note = Synthetic
  source 1..21: mol_type = other RNA
acaggcatacgccaccaaacc

SEQ ID NO: 5031 - RNA, 21 nt, synthetic construct
  misc_feature 1..21: note = Synthetic
  source 1..21: mol_type = other RNA
caggcatacgccaccaaaccc

SEQ ID NO: 5032 - RNA, 21 nt, synthetic construct
  misc_feature 1..21: note = Synthetic
  source 1..21: mol_type = other RNA
aggcatacgccaccaaacccg

SEQ ID NO: 5033 - RNA, 21 nt, synthetic construct
  misc_feature 1..21: note = Synthetic
  source 1..21: mol_type = other RNA
ggcatacgccaccaaacccgg

SEQ ID NO: 5034 - RNA, 21 nt, synthetic construct
  misc_feature 1..21: note = Synthetic
  source 1..21: mol_type = other RNA
gcatacgccaccaaacccggc

SEQ ID NO: 5035 - RNA, 21 nt, synthetic construct
  misc_feature 1..21: note = Synthetic
  source 1..21: mol_type = other RNA
catacgccaccaaacccggct

SEQ ID NO: 5036 - RNA, 21 nt, synthetic construct
  misc_feature 1..21: note = Synthetic
  source 1..21: mol_type = other RNA
atacgccaccaaacccggcta

SEQ ID NO: 5037 - RNA, 21 nt, synthetic construct
  misc_feature 1..21: note = Synthetic
  source 1..21: mol_type = other RNA
tacgccaccaaacccggctaa

SEQ ID NO: 5038 - RNA, 21 nt, synthetic construct
  misc_feature 1..21: note = Synthetic
  source 1..21: mol_type = other RNA
acgccaccaaacccggctaat

SEQ ID NO: 5039 - RNA, 21 nt, synthetic construct
  misc_feature 1..21: note = Synthetic
  source 1..21: mol_type = other RNA
cgccaccaaacccggctaatt

SEQ ID NO: 5040 - RNA, 21 nt, synthetic construct
  misc_feature 1..21: note = Synthetic
  source 1..21: mol_type = other RNA
gccaccaaacccggctaattt

SEQ ID NO: 5041 - RNA, 21 nt, synthetic construct
  misc_feature 1..21: note = Synthetic
  source 1..21: mol_type = other RNA
ccaccaaacccggctaatttt

SEQ ID NO: 5042 - RNA, 21 nt, synthetic construct
  misc_feature 1..21: note = Synthetic
  source 1..21: mol_type = other RNA
caccaaacccggctaattttt

SEQ ID NO: 5043 - RNA, 21 nt, synthetic construct
  misc_feature 1..21: note = Synthetic
  source 1..21: mol_type = other RNA
accaaacccggctaatttttt

SEQ ID NO: 5044 - RNA, 21 nt, synthetic construct
  misc_feature 1..21: note = Synthetic
  source 1..21: mol_type = other RNA
ccaaacccggctaattttttt

SEQ ID NO: 5045 - RNA, 21 nt, synthetic construct
  misc_feature 1..21: note = Synthetic
  source 1..21: mol_type = other RNA
caaacccggctaatttttttt

SEQ ID NO: 5046 - RNA, 21 nt, synthetic construct
  misc_feature 1..21: note = Synthetic
  source 1..21: mol_type = other RNA
aaacccggctaattttttttt

SEQ ID NO: 5047 - RNA, 21 nt, synthetic construct
  misc_feature 1..21: note = Synthetic
  source 1..21: mol_type = other RNA
aacccggctaatttttttttt

SEQ ID NO: 5048 - RNA, 21 nt, synthetic construct
  misc_feature 1..21: note = Synthetic
  source 1..21: mol_type = other RNA
acccggctaattttttttttt

SEQ ID NO: 5049 - RNA, 21 nt, synthetic construct
  misc_feature 1..21: note = Synthetic
  source 1..21: mol_type = other RNA
cccggctaattttttttttta

SEQ ID NO: 5050 - RNA, 21 nt, synthetic construct
  misc_feature 1..21: note = Synthetic
  source 1..21: mol_type = other RNA
ccggctaatttttttttttat

SEQ ID NO: 5051 - RNA, 21 nt, synthetic construct
  misc_feature 1..21: note = Synthetic
  source 1..21: mol_type = other RNA
cggctaatttttttttttatt

SEQ ID NO: 5052 - RNA, 21 nt, synthetic construct
  misc_feature 1..21: note = Synthetic
  source 1..21: mol_type = other RNA
ggctaatttttttttttattt

SEQ ID NO: 5053 - RNA, 21 nt, synthetic construct
  misc_feature 1..21: note = Synthetic
  source 1..21: mol_type = other RNA
gctaatttttttttttatttt

SEQ ID NO: 5054 - RNA, 21 nt, synthetic construct
  misc_feature 1..21: note = Synthetic
  source 1..21: mol_type = other RNA
ctaatttttttttttattttt

SEQ ID NO: 5055 - RNA, 21 nt, synthetic construct
  misc_feature 1..21: note = Synthetic
  source 1..21: mol_type = other RNA
taatttttttttttattttta

SEQ ID NO: 5056 - RNA, 21 nt, synthetic construct
  misc_feature 1..21: note = Synthetic
  source 1..21: mol_type = other RNA
aatttttttttttatttttag

SEQ ID NO: 5057 - RNA, 21 nt, synthetic construct
  misc_feature 1..21: note = Synthetic
  source 1..21: mol_type = other RNA
atttttttttttatttttagt

SEQ ID NO: 5058 - RNA, 21 nt, synthetic construct
  misc_feature 1..21: note = Synthetic
  source 1..21: mol_type = other RNA
tttttttttttatttttagta

SEQ ID NO: 5059 - RNA, 21 nt, synthetic construct
  misc_feature 1..21: note = Synthetic
  source 1..21: mol_type = other RNA
ttttttttttatttttagtag

SEQ ID NO: 5060 - RNA, 21 nt, synthetic construct
  misc_feature 1..21: note = Synthetic
  source 1..21: mol_type = other RNA
tttttttttatttttagtaga

SEQ ID NO: 5061 - RNA, 21 nt, synthetic construct
  misc_feature 1..21: note = Synthetic
  source 1..21: mol_type = other RNA
ttttttttatttttagtagag

SEQ ID NO: 5062 - RNA, 21 nt, synthetic construct
  misc_feature 1..21: note = Synthetic
  source 1..21: mol_type = other RNA
tttttttatttttagtagaga

SEQ ID NO: 5063 - RNA, 21 nt, synthetic construct
  misc_feature 1..21: note = Synthetic
  source 1..21: mol_type = other RNA
ttttttatttttagtagagat

SEQ ID NO: 5064 - RNA, 21 nt, synthetic construct
  misc_feature 1..21: note = Synthetic
  source 1..21: mol_type = other RNA
tttttatttttagtagagatg

SEQ ID NO: 5065 - RNA, 21 nt, synthetic construct
  misc_feature 1..21: note = Synthetic
  source 1..21: mol_type = other RNA
ttttatttttagtagagatgg

SEQ ID NO: 5066 - RNA, 21 nt, synthetic construct
  misc_feature 1..21: note = Synthetic
  source 1..21: mol_type = other RNA
tttatttttagtagagatggg

SEQ ID NO: 5067 - RNA, 21 nt, synthetic construct
  misc_feature 1..21: note = Synthetic
  source 1..21: mol_type = other RNA
ttatttttagtagagatgggg

SEQ ID NO: 5068 - RNA, 21 nt, synthetic construct
  misc_feature 1..21: note = Synthetic
  source 1..21: mol_type = other RNA
tatttttagtagagatggggt

SEQ ID NO: 5069 - RNA, 21 nt, synthetic construct
  misc_feature 1..21: note = Synthetic
  source 1..21: mol_type = other RNA
atttttagtagagatggggtt

SEQ ID NO: 5070 - RNA, 21 nt, synthetic construct
  misc_feature 1..21: note = Synthetic
  source 1..21: mol_type = other RNA
tttttagtagagatggggttt

SEQ ID NO: 5071 - RNA, 21 nt, synthetic construct
  misc_feature 1..21: note = Synthetic
  source 1..21: mol_type = other RNA
ttttagtagagatggggtttc

SEQ ID NO: 5072 - RNA, 21 nt, synthetic construct
  misc_feature 1..21: note = Synthetic
  source 1..21: mol_type = other RNA
tttagtagagatggggtttca

SEQ ID NO: 5073 - RNA, 21 nt, synthetic construct
  misc_feature 1..21: note = Synthetic
  source 1..21: mol_type = other RNA
ttagtagagatggggtttcac

SEQ ID NO: 5074 - RNA, 21 nt, synthetic construct
  misc_feature 1..21: note = Synthetic
  source 1..21: mol_type = other RNA
tagtagagatggggtttcacc

SEQ ID NO: 5075 - RNA, 21 nt, synthetic construct
  misc_feature 1..21: note = Synthetic
  source 1..21: mol_type = other RNA
agtagagatggggtttcaccg

SEQ ID NO: 5076 - RNA, 21 nt, synthetic construct
  misc_feature 1..21: note = Synthetic
  source 1..21: mol_type = other RNA
gtagagatggggtttcaccgt

SEQ ID NO: 5077 - RNA, 21 nt, synthetic construct
  misc_feature 1..21: note = Synthetic
  source 1..21: mol_type = other RNA
tagagatggggtttcaccgtg

SEQ ID NO: 5078 - RNA, 21 nt, synthetic construct
  misc_feature 1..21: note = Synthetic
  source 1..21: mol_type = other RNA
agagatggggtttcaccgtgt

SEQ ID NO: 5079 - RNA, 21 nt, synthetic construct
  misc_feature 1..21: note = Synthetic
  source 1..21: mol_type = other RNA
gagatggggtttcaccgtgtt

SEQ ID NO: 5080 - RNA, 21 nt, synthetic construct
  misc_feature 1..21: note = Synthetic
  source 1..21: mol_type = other RNA
agatggggtttcaccgtgtta

SEQ ID NO: 5081 - RNA, 21 nt, synthetic construct
  misc_feature 1..21: note = Synthetic
  source 1..21: mol_type = other RNA
gatggggtttcaccgtgttag

SEQ ID NO: 5082 - RNA, 21 nt, synthetic construct
  misc_feature 1..21: note = Synthetic
  source 1..21: mol_type = other RNA
atggggtttcaccgtgttagc

SEQ ID NO: 5083 - RNA, 21 nt, synthetic construct
  misc_feature 1..21: note = Synthetic
  source 1..21: mol_type = other RNA
tggggtttcaccgtgttagcc

SEQ ID NO: 5084 - RNA, 21 nt, synthetic construct
  misc_feature 1..21: note = Synthetic
  source 1..21: mol_type = other RNA
ggggtttcaccgtgttagcca

SEQ ID NO: 5085 - RNA, 21 nt, synthetic construct
  misc_feature 1..21: note = Synthetic
  source 1..21: mol_type = other RNA
gggtttcaccgtgttagccag

SEQ ID NO: 5086 - RNA, 21 nt, synthetic construct
  misc_feature 1..21: note = Synthetic
  source 1..21: mol_type = other RNA
ggtttcaccgtgttagccagg

SEQ ID NO: 5087 - RNA, 21 nt, synthetic construct
  misc_feature 1..21: note = Synthetic
  source 1..21: mol_type = other RNA
gtttcaccgtgttagccaggg

SEQ ID NO: 5088 - RNA, 21 nt, synthetic construct
  misc_feature 1..21: note = Synthetic
  source 1..21: mol_type = other RNA
tttcaccgtgttagccagggt

SEQ ID NO: 5089 - RNA, 21 nt, synthetic construct
  misc_feature 1..21: note = Synthetic
  source 1..21: mol_type = other RNA
ttcaccgtgttagccagggtg

SEQ ID NO: 5090 - RNA, 21 nt, synthetic construct
  misc_feature 1..21: note = Synthetic
  source 1..21: mol_type = other RNA
tcaccgtgttagccagggtgg

SEQ ID NO: 5091 - RNA, 21 nt, synthetic construct
  misc_feature 1..21: note = Synthetic
  source 1..21: mol_type = other RNA
caccgtgttagccagggtggt

SEQ ID NO: 5092 - RNA, 21 nt, synthetic construct
  misc_feature 1..21: note = Synthetic
  source 1..21: mol_type = other RNA
accgtgttagccagggtggtc

SEQ ID NO: 5093 - RNA, 21 nt, synthetic construct
  misc_feature 1..21: note = Synthetic
  source 1..21: mol_type = other RNA
ccgtgttagccagggtggtct

SEQ ID NO: 5094 - RNA, 21 nt, synthetic construct
  misc_feature 1..21: note = Synthetic
  source 1..21: mol_type = other RNA
cgtgttagccagggtggtctt

SEQ ID NO: 5095 - RNA, 21 nt, synthetic construct
  misc_feature 1..21: note = Synthetic
  source 1..21: mol_type = other RNA
gtgttagccagggtggtcttg

SEQ ID NO: 5096 - RNA, 21 nt, synthetic construct
  misc_feature 1..21: note = Synthetic
  source 1..21: mol_type = other RNA
tgttagccagggtggtcttga

SEQ ID NO: 5097 - RNA, 21 nt, synthetic construct
  misc_feature 1..21: note = Synthetic
  source 1..21: mol_type = other RNA
gttagccagggtggtcttgat

SEQ ID NO: 5098 - RNA, 21 nt, synthetic construct
  misc_feature 1..21: note = Synthetic
  source 1..21: mol_type = other RNA
ttagccagggtggtcttgatc

SEQ ID NO: 5099 - RNA, 21 nt, synthetic construct
  misc_feature 1..21: note = Synthetic
  source 1..21: mol_type = other RNA
tagccagggtggtcttgatct

SEQ ID NO: 5100 - RNA, 21 nt, synthetic construct
  misc_feature 1..21: note = Synthetic
  source 1..21: mol_type = other RNA
agccagggtggtcttgatctc

SEQ ID NO: 5101 - RNA, 21 nt, synthetic construct
  misc_feature 1..21: note = Synthetic
  source 1..21: mol_type = other RNA
gccagggtggtcttgatctcc

SEQ ID NO: 5102 - RNA, 21 nt, synthetic construct
  misc_feature 1..21: note = Synthetic
  source 1..21: mol_type = other RNA
ccagggtggtcttgatctcct

SEQ ID NO: 5103 - RNA, 21 nt, synthetic construct
  misc_feature 1..21: note = Synthetic
  source 1..21: mol_type = other RNA
cagggtggtcttgatctcctg

SEQ ID NO: 5104 - RNA, 21 nt, synthetic construct
  misc_feature 1..21: note = Synthetic
  source 1..21: mol_type = other RNA
agggtggtcttgatctcctga

SEQ ID NO: 5105 - RNA, 21 nt, synthetic construct
  misc_feature 1..21: note = Synthetic
  source 1..21: mol_type = other RNA
gggtggtcttgatctcctgac

SEQ ID NO: 5106 - RNA, 21 nt, synthetic construct
  misc_feature 1..21: note = Synthetic
  source 1..21: mol_type = other RNA
ggtggtcttgatctcctgacc

SEQ ID NO: 5107 - RNA, 21 nt, synthetic construct
  misc_feature 1..21: note = Synthetic
  source 1..21: mol_type = other RNA
gtggtcttgatctcctgacct

SEQ ID NO: 5108 - RNA, 21 nt, synthetic construct
  misc_feature 1..21: note = Synthetic
  source 1..21: mol_type = other RNA
tggtcttgatctcctgacctc

SEQ ID NO: 5109 - RNA, 21 nt, synthetic construct
  misc_feature 1..21: note = Synthetic
  source 1..21: mol_type = other RNA
ggtcttgatctcctgacctca

SEQ ID NO: 5110 - RNA, 21 nt, synthetic construct
  misc_feature 1..21: note = Synthetic
  source 1..21: mol_type = other RNA
gtcttgatctcctgacctcat

SEQ ID NO: 5111 - RNA, 21 nt, synthetic construct
  misc_feature 1..21: note = Synthetic
  source 1..21: mol_type = other RNA
tcttgatctcctgacctcatg

SEQ ID NO: 5112 - RNA, 21 nt, synthetic construct
  misc_feature 1..21: note = Synthetic
  source 1..21: mol_type = other RNA
cttgatctcctgacctcatga

SEQ ID NO: 5113 - RNA, 21 nt, synthetic construct
  misc_feature 1..21: note = Synthetic
  source 1..21: mol_type = other RNA
ttgatctcctgacctcatgat

SEQ ID NO: 5114 - RNA, 21 nt, synthetic construct
  misc_feature 1..21: note = Synthetic
  source 1..21: mol_type = other RNA
tgatctcctgacctcatgatc

SEQ ID NO: 5115 - RNA, 21 nt, synthetic construct
  misc_feature 1..21: note = Synthetic
  source 1..21: mol_type = other RNA
gatctcctgacctcatgatcc

SEQ ID NO: 5116 - RNA, 21 nt, synthetic construct
  misc_feature 1..21: note = Synthetic
  source 1..21: mol_type = other RNA
atctcctgacctcatgatccg

SEQ ID NO: 5117 - RNA, 21 nt, synthetic construct
  misc_feature 1..21: note = Synthetic
  source 1..21: mol_type = other RNA
tctcctgacctcatgatccgc

SEQ ID NO: 5118 - RNA, 21 nt, synthetic construct
  misc_feature 1..21: note = Synthetic
  source 1..21: mol_type = other RNA
ctcctgacctcatgatccgcc

SEQ ID NO: 5119 - RNA, 21 nt, synthetic construct
  misc_feature 1..21: note = Synthetic
  source 1..21: mol_type = other RNA
tcctgacctcatgatccgccc

SEQ ID NO: 5120 - RNA, 21 nt, synthetic construct
  misc_feature 1..21: note = Synthetic
  source 1..21: mol_type = other RNA
cctgacctcatgatccgcccg

SEQ ID NO: 5121 - RNA, 21 nt, synthetic construct
  misc_feature 1..21: note = Synthetic
  source 1..21: mol_type = other RNA
ctgacctcatgatccgcccgc

SEQ ID NO: 5122 - RNA, 21 nt, synthetic construct
  misc_feature 1..21: note = Synthetic
  source 1..21: mol_type = other RNA
tgacctcatgatccgcccgcc

SEQ ID NO: 5123 - RNA, 21 nt, synthetic construct
  misc_feature 1..21: note = Synthetic
  source 1..21: mol_type = other RNA
gacctcatgatccgcccgcct

SEQ ID NO: 5124 - RNA, 21 nt, synthetic construct
  misc_feature 1..21: note = Synthetic
  source 1..21: mol_type = other RNA
acctcatgatccgcccgcctc

SEQ ID NO: 5125 - RNA, 21 nt, synthetic construct
  misc_feature 1..21: note = Synthetic
  source 1..21: mol_type = other RNA
cctcatgatccgcccgcctcg

SEQ ID NO: 5126 - RNA, 21 nt, synthetic construct
  misc_feature 1..21: note = Synthetic
  source 1..21: mol_type = other RNA
ctcatgatccgcccgcctcgg

SEQ ID NO: 5127 - RNA, 21 nt, synthetic construct
  misc_feature 1..21: note = Synthetic
  source 1..21: mol_type = other RNA
tcatgatccgcccgcctcggc

SEQ ID NO: 5128 - RNA, 21 nt, synthetic construct
  misc_feature 1..21: note = Synthetic
  source 1..21: mol_type = other RNA
catgatccgcccgcctcggcc

SEQ ID NO: 5129 - RNA, 21 nt, synthetic construct
  misc_feature 1..21: note = Synthetic
  source 1..21: mol_type = other RNA
atgatccgcccgcctcggcct

SEQ ID NO: 5130 - RNA, 21 nt, synthetic construct
  misc_feature 1..21: note = Synthetic
  source 1..21: mol_type = other RNA
tgatccgcccgcctcggcctc

SEQ ID NO: 5131 - RNA, 21 nt, synthetic construct
  misc_feature 1..21: note = Synthetic
  source 1..21: mol_type = other RNA
gatccgcccgcctcggcctcc

SEQ ID NO: 5132 - RNA, 21 nt, synthetic construct
  misc_feature 1..21: note = Synthetic
  source 1..21: mol_type = other RNA
atccgcccgcctcggcctccc

SEQ ID NO: 5133 - RNA, 21 nt, synthetic construct
  misc_feature 1..21: note = Synthetic
  source 1..21: mol_type = other RNA
tccgcccgcctcggcctccca

SEQ ID NO: 5134 - RNA, 21 nt, synthetic construct
  misc_feature 1..21: note = Synthetic
  source 1..21: mol_type = other RNA
ccgcccgcctcggcctcccaa

SEQ ID NO: 5135 - RNA, 21 nt, synthetic construct
  misc_feature 1..21: note = Synthetic
  source 1..21: mol_type = other RNA
cgcccgcctcggcctcccaaa

SEQ ID NO: 5136 - RNA, 21 nt, synthetic construct
  misc_feature 1..21: note = Synthetic
  source 1..21: mol_type = other RNA
gcccgcctcggcctcccaaag

SEQ ID NO: 5137 - RNA, 21 nt, synthetic construct
  misc_feature 1..21: note = Synthetic
  source 1..21: mol_type = other RNA
cccgcctcggcctcccaaagt

SEQ ID NO: 5138 - RNA, 21 nt, synthetic construct
  misc_feature 1..21: note = Synthetic
  source 1..21: mol_type = other RNA
ccgcctcggcctcccaaagtg

SEQ ID NO: 5139 - RNA, 21 nt, synthetic construct
  misc_feature 1..21: note = Synthetic
  source 1..21: mol_type = other RNA
cgcctcggcctcccaaagtgc

SEQ ID NO: 5140 - RNA, 21 nt, synthetic construct
  misc_feature 1..21: note = Synthetic
  source 1..21: mol_type = other RNA
gcctcggcctcccaaagtgct

SEQ ID NO: 5141 - RNA, 21 nt, synthetic construct
  misc_feature 1..21: note = Synthetic
  source 1..21: mol_type = other RNA
cctcggcctcccaaagtgctg

SEQ ID NO: 5142 - RNA, 21 nt, synthetic construct
  misc_feature 1..21: note = Synthetic
  source 1..21: mol_type = other RNA
ctcggcctcccaaagtgctgg

SEQ ID NO: 5143 - RNA, 21 nt, synthetic construct
  misc_feature 1..21: note = Synthetic
  source 1..21: mol_type = other RNA
tcggcctcccaaagtgctggg

SEQ ID NO: 5144 - RNA, 21 nt, synthetic construct
  misc_feature 1..21: note = Synthetic
  source 1..21: mol_type = other RNA
cggcctcccaaagtgctggga

SEQ ID NO: 5145 - RNA, 21 nt, synthetic construct
  misc_feature 1..21: note = Synthetic
  source 1..21: mol_type = other RNA
ggcctcccaaagtgctgggat

SEQ ID NO: 5146 - RNA, 21 nt, synthetic construct
  misc_feature 1..21: note = Synthetic
  source 1..21: mol_type = other RNA
gcctcccaaagtgctgggatt

SEQ ID NO: 5147 - RNA, 21 nt, synthetic construct
  misc_feature 1..21: note = Synthetic
  source 1..21: mol_type = other RNA
cctcccaaagtgctgggatta

SEQ ID NO: 5148 - RNA, 21 nt, synthetic construct
  misc_feature 1..21: note = Synthetic
  source 1..21: mol_type = other RNA
ctcccaaagtgctgggattac

SEQ ID NO: 5149 - RNA, 21 nt, synthetic construct
  misc_feature 1..21: note = Synthetic
  source 1..21: mol_type = other RNA
tcccaaagtgctgggattaca

SEQ ID NO: 5150 - RNA, 21 nt, synthetic construct
  misc_feature 1..21: note = Synthetic
  source 1..21: mol_type = other RNA
cccaaagtgctgggattacag

SEQ ID NO: 5151 - RNA, 21 nt, synthetic construct
  misc_feature 1..21: note = Synthetic
  source 1..21: mol_type = other RNA
ccaaagtgctgggattacagg

SEQ ID NO: 5152 - RNA, 21 nt, synthetic construct
  misc_feature 1..21: note = Synthetic
  source 1..21: mol_type = other RNA
caaagtgctgggattacaggc

SEQ ID NO: 5153 - RNA, 21 nt, synthetic construct
  misc_feature 1..21: note = Synthetic
  source 1..21: mol_type = other RNA
aaagtgctgggattacaggcg

SEQ ID NO: 5154 - RNA, 21 nt, synthetic construct
  misc_feature 1..21: note = Synthetic
  source 1..21: mol_type = other RNA
aagtgctgggattacaggcgt

SEQ ID NO: 5155 - RNA, 21 nt, synthetic construct
  misc_feature 1..21: note = Synthetic
  source 1..21: mol_type = other RNA
agtgctgggattacaggcgtg

SEQ ID NO: 5156 - RNA, 21 nt, synthetic construct
  misc_feature 1..21: note = Synthetic
  source 1..21: mol_type = other RNA
gtgctgggattacaggcgtga

SEQ ID NO: 5157 - RNA, 21 nt, synthetic construct
  misc_feature 1..21: note = Synthetic
  source 1..21: mol_type = other RNA
tgctgggattacaggcgtgag

SEQ ID NO: 5158 - RNA, 21 nt, synthetic construct
  misc_feature 1..21: note = Synthetic
  source 1..21: mol_type = other RNA
gctgggattacaggcgtgagc

SEQ ID NO: 5159 - RNA, 21 nt, synthetic construct
  misc_feature 1..21: note = Synthetic
  source 1..21: mol_type = other RNA
ctgggattacaggcgtgagcc

SEQ ID NO: 5160 - RNA, 21 nt, synthetic construct
  misc_feature 1..21: note = Synthetic
  source 1..21: mol_type = other RNA
tgggattacaggcgtgagcca

SEQ ID NO: 5161 - RNA, 21 nt, synthetic construct
  misc_feature 1..21: note = Synthetic
  source 1..21: mol_type = other RNA
gggattacaggcgtgagccac

SEQ ID NO: 5162 - RNA, 21 nt, synthetic construct
  misc_feature 1..21: note = Synthetic
  source 1..21: mol_type = other RNA
ggattacaggcgtgagccacc

SEQ ID NO: 5163 - RNA, 21 nt, synthetic construct
  misc_feature 1..21: note = Synthetic
  source 1..21: mol_type = other RNA
gattacaggcgtgagccaccg

SEQ ID NO: 5164 - RNA, 21 nt, synthetic construct
  misc_feature 1..21: note = Synthetic
  source 1..21: mol_type = other RNA
attacaggcgtgagccaccgc

SEQ ID NO: 5165 - RNA, 21 nt, synthetic construct
  misc_feature 1..21: note = Synthetic
  source 1..21: mol_type = other RNA
ttacaggcgtgagccaccgcg

SEQ ID NO: 5166 - RNA, 21 nt, synthetic construct
  misc_feature 1..21: note = Synthetic
  source 1..21: mol_type = other RNA
tacaggcgtgagccaccgcgc

SEQ ID NO: 5167 - RNA, 21 nt, synthetic construct
  misc_feature 1..21: note = Synthetic
  source 1..21: mol_type = other RNA
acaggcgtgagccaccgcgcc

SEQ ID NO: 5168 - RNA, 21 nt, synthetic construct
  misc_feature 1..21: note = Synthetic
  source 1..21: mol_type = other RNA
caggcgtgagccaccgcgccc

SEQ ID NO: 5169 - RNA, 21 nt, synthetic construct
  misc_feature 1..21: note = Synthetic
  source 1..21: mol_type = other RNA
aggcgtgagccaccgcgcccg

SEQ ID NO: 5170 - RNA, 21 nt, synthetic construct
  misc_feature 1..21: note = Synthetic
  source 1..21: mol_type = other RNA
ggcgtgagccaccgcgcccgg

SEQ ID NO: 5171 - RNA, 21 nt, synthetic construct
  misc_feature 1..21: note = Synthetic
  source 1..21: mol_type = other RNA
gcgtgagccaccgcgcccggc

SEQ ID NO: 5172 - RNA, 21 nt, synthetic construct
  misc_feature 1..21: note = Synthetic
  source 1..21: mol_type = other RNA
cgtgagccaccgcgcccggcc

SEQ ID NO: 5173 - RNA, 21 nt, synthetic construct
  misc_feature 1..21: note = Synthetic
  source 1..21: mol_type = other RNA
gtgagccaccgcgcccggcca

SEQ ID NO: 5174 - RNA, 21 nt, synthetic construct
  misc_feature 1..21: note = Synthetic
  source 1..21: mol_type = other RNA
tgagccaccgcgcccggccat

SEQ ID NO: 5175 - RNA, 21 nt, synthetic construct
  misc_feature 1..21: note = Synthetic
  source 1..21: mol_type = other RNA
gagccaccgcgcccggccatc

SEQ ID NO: 5176 - RNA, 21 nt, synthetic construct
  misc_feature 1..21: note = Synthetic
  source 1..21: mol_type = other RNA
agccaccgcgcccggccatca

SEQ ID NO: 5177 - RNA, 21 nt, synthetic construct
  misc_feature 1..21: note = Synthetic
  source 1..21: mol_type = other RNA
gccaccgcgcccggccatcat

SEQ ID NO: 5178 - RNA, 21 nt, synthetic construct
  misc_feature 1..21: note = Synthetic
  source 1..21: mol_type = other RNA
ccaccgcgcccggccatcatt

SEQ ID NO: 5179 - RNA, 21 nt, synthetic construct
  misc_feature 1..21: note = Synthetic
  source 1..21: mol_type = other RNA
caccgcgcccggccatcattt

SEQ ID NO: 5180 - RNA, 21 nt, synthetic construct
  misc_feature 1..21: note = Synthetic
  source 1..21: mol_type = other RNA
accgcgcccggccatcatttc

SEQ ID NO: 5181 - RNA, 21 nt, synthetic construct
  misc_feature 1..21: note = Synthetic
  source 1..21: mol_type = other RNA
ccgcgcccggccatcatttct

SEQ ID NO: 5182 - RNA, 21 nt, synthetic construct
  misc_feature 1..21: note = Synthetic
  source 1..21: mol_type = other RNA
cgcgcccggccatcatttcta

SEQ ID NO: 5183 - RNA, 21 nt, synthetic construct
  misc_feature 1..21: note = Synthetic
  source 1..21: mol_type = other RNA
gcgcccggccatcatttctat

SEQ ID NO: 5184 - RNA, 21 nt, synthetic construct
  misc_feature 1..21: note = Synthetic
  source 1..21: mol_type = other RNA
cgcccggccatcatttctatg

SEQ ID NO: 5185 - RNA, 21 nt, synthetic construct
  misc_feature 1..21: note = Synthetic
  source 1..21: mol_type = other RNA
gcccggccatcatttctatgc

SEQ ID NO: 5186 - RNA, 21 nt, synthetic construct
  misc_feature 1..21: note = Synthetic
  source 1..21: mol_type = other RNA
cccggccatcatttctatgct

SEQ ID NO: 5187 - RNA, 21 nt, synthetic construct
  misc_feature 1..21: note = Synthetic
  source 1..21: mol_type = other RNA
ccggccatcatttctatgcta

SEQ ID NO: 5188 - RNA, 21 nt, synthetic construct
  misc_feature 1..21: note = Synthetic
  source 1..21: mol_type = other RNA
cggccatcatttctatgctac

SEQ ID NO: 5189 - RNA, 21 nt, synthetic construct
  misc_feature 1..21: note = Synthetic
  source 1..21: mol_type = other RNA
ggccatcatttctatgctacc

SEQ ID NO: 5190 - RNA, 21 nt, synthetic construct
  misc_feature 1..21: note = Synthetic
  source 1..21: mol_type = other RNA
gccatcatttctatgctacca

SEQ ID NO: 5191 - RNA, 21 nt, synthetic construct
  misc_feature 1..21: note = Synthetic
  source 1..21: mol_type = other RNA
ccatcatttctatgctaccat

SEQ ID NO: 5192 - RNA, 21 nt, synthetic construct
  misc_feature 1..21: note = Synthetic
  source 1..21: mol_type = other RNA
catcatttctatgctaccatc

SEQ ID NO: 5193 - RNA, 21 nt, synthetic construct
  misc_feature 1..21: note = Synthetic
  source 1..21: mol_type = other RNA
atcatttctatgctaccatct

SEQ ID NO: 5194 - RNA, 21 nt, synthetic construct
  misc_feature 1..21: note = Synthetic
  source 1..21: mol_type = other RNA
tcatttctatgctaccatctc

SEQ ID NO: 5195 - RNA, 21 nt, synthetic construct
  misc_feature 1..21: note = Synthetic
  source 1..21: mol_type = other RNA
catttctatgctaccatctca

SEQ ID NO: 5196 - RNA, 21 nt, synthetic construct
  misc_feature 1..21: note = Synthetic
  source 1..21: mol_type = other RNA
atttctatgctaccatctcag

SEQ ID NO: 5197 - RNA, 21 nt, synthetic construct
  misc_feature 1..21: note = Synthetic
  source 1..21: mol_type = other RNA
tttctatgctaccatctcagc

SEQ ID NO: 5198 - RNA, 21 nt, synthetic construct
  misc_feature 1..21: note = Synthetic
  source 1..21: mol_type = other RNA
ttctatgctaccatctcagca

SEQ ID NO: 5199 - RNA, 21 nt, synthetic construct
  misc_feature 1..21: note = Synthetic
  source 1..21: mol_type = other RNA
tctatgctaccatctcagcat

SEQ ID NO: 5200 - RNA, 21 nt, synthetic construct
  misc_feature 1..21: note = Synthetic
  source 1..21: mol_type = other RNA
ctatgctaccatctcagcatc

SEQ ID NO: 5201 - RNA, 21 nt, synthetic construct
  misc_feature 1..21: note = Synthetic
  source 1..21: mol_type = other RNA
tatgctaccatctcagcatct

SEQ ID NO: 5202 - RNA, 21 nt, synthetic construct
  misc_feature 1..21: note = Synthetic
  source 1..21: mol_type = other RNA
atgctaccatctcagcatctg

SEQ ID NO: 5203 - RNA, 21 nt, synthetic construct
  misc_feature 1..21: note = Synthetic
  source 1..21: mol_type = other RNA
tgctaccatctcagcatctgt

SEQ ID NO: 5204 - RNA, 21 nt, synthetic construct
  misc_feature 1..21: note = Synthetic
  source 1..21: mol_type = other RNA
gctaccatctcagcatctgtg

SEQ ID NO: 5205 - RNA, 21 nt, synthetic construct
  misc_feature 1..21: note = Synthetic
  source 1..21: mol_type = other RNA
ctaccatctcagcatctgtgg

SEQ ID NO: 5206 - RNA, 21 nt, synthetic construct
  misc_feature 1..21: note = Synthetic
  source 1..21: mol_type = other RNA
taccatctcagcatctgtggt

SEQ ID NO: 5207 - RNA, 21 nt, synthetic construct
  misc_feature 1..21: note = Synthetic
  source 1..21: mol_type = other RNA
accatctcagcatctgtggtg

SEQ ID NO: 5208 - RNA, 21 nt, synthetic construct
  misc_feature 1..21: note = Synthetic
  source 1..21: mol_type = other RNA
ccatctcagcatctgtggtga

SEQ ID NO: 5209 - RNA, 21 nt, synthetic construct
  misc_feature 1..21: note = Synthetic
  source 1..21: mol_type = other RNA
catctcagcatctgtggtgag

SEQ ID NO: 5210 - RNA, 21 nt, synthetic construct
  misc_feature 1..21: note = Synthetic
  source 1..21: mol_type = other RNA
atctcagcatctgtggtgagg

SEQ ID NO: 5211 - RNA, 21 nt, synthetic construct
  misc_feature 1..21: note = Synthetic
  source 1..21: mol_type = other RNA
tctcagcatctgtggtgaggg

SEQ ID NO: 5212 - RNA, 21 nt, synthetic construct
  misc_feature 1..21: note = Synthetic
  source 1..21: mol_type = other RNA
ctcagcatctgtggtgagggg

SEQ ID NO: 5213 - RNA, 21 nt, synthetic construct
  misc_feature 1..21: note = Synthetic
  source 1..21: mol_type = other RNA
tcagcatctgtggtgagggga

SEQ ID NO: 5214 - RNA, 21 nt, synthetic construct
  misc_feature 1..21: note = Synthetic
  source 1..21: mol_type = other RNA
cagcatctgtggtgaggggag

SEQ ID NO: 5215 - RNA, 21 nt, synthetic construct
  misc_feature 1..21: note = Synthetic
  source 1..21: mol_type = other RNA
agcatctgtggtgaggggagg

SEQ ID NO: 5216 - RNA, 21 nt, synthetic construct
  misc_feature 1..21: note = Synthetic
  source 1..21: mol_type = other RNA
gcatctgtggtgaggggaggg

SEQ ID NO: 5217 - RNA, 21 nt, synthetic construct
  misc_feature 1..21: note = Synthetic
  source 1..21: mol_type = other RNA
catctgtggtgaggggagggg

SEQ ID NO: 5218 - RNA, 21 nt, synthetic construct
  misc_feature 1..21: note = Synthetic
  source 1..21: mol_type = other RNA
atctgtggtgaggggaggggt

SEQ ID NO: 5219 - RNA, 21 nt, synthetic construct
  misc_feature 1..21: note = Synthetic
  source 1..21: mol_type = other RNA
tctgtggtgaggggaggggtg

SEQ ID NO: 5220 - RNA, 21 nt, synthetic construct
  misc_feature 1..21: note = Synthetic
  source 1..21: mol_type = other RNA
ctgtggtgaggggaggggtgc

SEQ ID NO: 5221 - RNA, 21 nt, synthetic construct
  misc_feature 1..21: note = Synthetic
  source 1..21: mol_type = other RNA
tgtggtgaggggaggggtgcc

SEQ ID NO: 5222 - RNA, 21 nt, synthetic construct
  misc_feature 1..21: note = Synthetic
  source 1..21: mol_type = other RNA
gtggtgaggggaggggtgcca

SEQ ID NO: 5223 - RNA, 21 nt, synthetic construct
  misc_feature 1..21: note = Synthetic
  source 1..21: mol_type = other RNA
tggtgaggggaggggtgccac

SEQ ID NO: 5224 - RNA, 21 nt, synthetic construct
  misc_feature 1..21: note = Synthetic
  source 1..21: mol_type = other RNA
ggtgaggggaggggtgccact

SEQ ID NO: 5225 - RNA, 21 nt, synthetic construct
  misc_feature 1..21: note = Synthetic
  source 1..21: mol_type = other RNA
gtgaggggaggggtgccactt

SEQ ID NO: 5226 - RNA, 21 nt, synthetic construct
  misc_feature 1..21: note = Synthetic
  source 1..21: mol_type = other RNA
tgaggggaggggtgccacttc

SEQ ID NO: 5227 - RNA, 21 nt, synthetic construct
  misc_feature 1..21: note = Synthetic
  source 1..21: mol_type = other RNA
gaggggaggggtgccacttcc

SEQ ID NO: 5228 - RNA, 21 nt, synthetic construct
  misc_feature 1..21: note = Synthetic
  source 1..21: mol_type = other RNA
aggggaggggtgccacttcct

SEQ ID NO: 5229 - RNA, 21 nt, synthetic construct
  misc_feature 1..21: note = Synthetic
  source 1..21: mol_type = other RNA
ggggaggggtgccacttcctc

SEQ ID NO: 5230 - RNA, 21 nt, synthetic construct
  misc_feature 1..21: note = Synthetic
  source 1..21: mol_type = other RNA
gggaggggtgccacttcctct

SEQ ID NO: 5231 - RNA, 21 nt, synthetic construct
  misc_feature 1..21: note = Synthetic
  source 1..21: mol_type = other RNA
ggaggggtgccacttcctctt

SEQ ID NO: 5232 - RNA, 21 nt, synthetic construct
  misc_feature 1..21: note = Synthetic
  source 1..21: mol_type = other RNA
gaggggtgccacttcctcttt

SEQ ID NO: 5233 - RNA, 21 nt, synthetic construct
  misc_feature 1..21: note = Synthetic
  source 1..21: mol_type = other RNA
aggggtgccacttcctctttg

SEQ ID NO: 5234 - RNA, 21 nt, synthetic construct
  misc_feature 1..21: note = Synthetic
  source 1..21: mol_type = other RNA
ggggtgccacttcctctttgc

SEQ ID NO: 5235 - RNA, 21 nt, synthetic construct
  misc_feature 1..21: note = Synthetic
  source 1..21: mol_type = other RNA
gggtgccacttcctctttgcc

SEQ ID NO: 5236 - RNA, 21 nt, synthetic construct
  misc_feature 1..21: note = Synthetic
  source 1..21: mol_type = other RNA
ggtgccacttcctctttgccc

SEQ ID NO: 5237 - RNA, 21 nt, synthetic construct
  misc_feature 1..21: note = Synthetic
  source 1..21: mol_type = other RNA
gtgccacttcctctttgccca

SEQ ID NO: 5238 - RNA, 21 nt, synthetic construct
  misc_feature 1..21: note = Synthetic
  source 1..21: mol_type = other RNA
tgccacttcctctttgcccag

SEQ ID NO: 5239 - RNA, 21 nt, synthetic construct
  misc_feature 1..21: note = Synthetic
  source 1..21: mol_type = other RNA
gccacttcctctttgcccagc

SEQ ID NO: 5240 - RNA, 21 nt, synthetic construct
  misc_feature 1..21: note = Synthetic
  source 1..21: mol_type = other RNA
ccacttcctctttgcccagcg

SEQ ID NO: 5241 - RNA, 21 nt, synthetic construct
  misc_feature 1..21: note = Synthetic
  source 1..21: mol_type = other RNA
cacttcctctttgcccagcga

SEQ ID NO: 5242 - RNA, 21 nt, synthetic construct
  misc_feature 1..21: note = Synthetic
  source 1..21: mol_type = other RNA
acttcctctttgcccagcgag

SEQ ID NO: 5243 - RNA, 21 nt, synthetic construct
  misc_feature 1..21: note = Synthetic
  source 1..21: mol_type = other RNA
cttcctctttgcccagcgaga

SEQ ID NO: 5244 - RNA, 21 nt, synthetic construct
  misc_feature 1..21: note = Synthetic
  source 1..21: mol_type = other RNA
ttcctctttgcccagcgagag

SEQ ID NO: 5245 - RNA, 21 nt, synthetic construct
  misc_feature 1..21: note = Synthetic
  source 1..21: mol_type = other RNA
tcctctttgcccagcgagagg

SEQ ID NO: 5246 - RNA, 21 nt, synthetic construct
  misc_feature 1..21: note = Synthetic
  source 1..21: mol_type = other RNA
cctctttgcccagcgagaggg

SEQ ID NO: 5247 - RNA, 21 nt, synthetic construct
  misc_feature 1..21: note = Synthetic
  source 1..21: mol_type = other RNA
ctctttgcccagcgagagggc

SEQ ID NO: 5248 - RNA, 21 nt, synthetic construct
  misc_feature 1..21: note = Synthetic
  source 1..21: mol_type = other RNA
tctttgcccagcgagagggcg

SEQ ID NO: 5249 - RNA, 21 nt, synthetic construct
  misc_feature 1..21: note = Synthetic
  source 1..21: mol_type = other RNA
ctttgcccagcgagagggcgt

SEQ ID NO: 5250 - RNA, 21 nt, synthetic construct
  misc_feature 1..21: note = Synthetic
  source 1..21: mol_type = other RNA
tttgcccagcgagagggcgta

SEQ ID NO: 5251 - RNA, 21 nt, synthetic construct
  misc_feature 1..21: note = Synthetic
  source 1..21: mol_type = other RNA
ttgcccagcgagagggcgtac

SEQ ID NO: 5252 - RNA, 21 nt, synthetic construct
  misc_feature 1..21: note = Synthetic
  source 1..21: mol_type = other RNA
tgcccagcgagagggcgtact

SEQ ID NO: 5253 - RNA, 21 nt, synthetic construct
  misc_feature 1..21: note = Synthetic
  source 1..21: mol_type = other RNA
gcccagcgagagggcgtactc

SEQ ID NO: 5254 - RNA, 21 nt, synthetic construct
  misc_feature 1..21: note = Synthetic
  source 1..21: mol_type = other RNA
cccagcgagagggcgtactct

SEQ ID NO: 5255 - RNA, 21 nt, synthetic construct
  misc_feature 1..21: note = Synthetic
  source 1..21: mol_type = other RNA
ccagcgagagggcgtactcta

SEQ ID NO: 5256 - RNA, 21 nt, synthetic construct
  misc_feature 1..21: note = Synthetic
  source 1..21: mol_type = other RNA
cagcgagagggcgtactctac

SEQ ID NO: 5257 - RNA, 21 nt, synthetic construct
  misc_feature 1..21: note = Synthetic
  source 1..21: mol_type = other RNA
agcgagagggcgtactctacc

SEQ ID NO: 5258 - RNA, 21 nt, synthetic construct
  misc_feature 1..21: note = Synthetic
  source 1..21: mol_type = other RNA
gcgagagggcgtactctaccc

SEQ ID NO: 5259 - RNA, 21 nt, synthetic construct
  misc_feature 1..21: note = Synthetic
  source 1..21: mol_type = other RNA
cgagagggcgtactctacccc

SEQ ID NO: 5260 - RNA, 21 nt, synthetic construct
  misc_feature 1..21: note = Synthetic
  source 1..21: mol_type = other RNA
gagagggcgtactctacccca

SEQ ID NO: 5261 - RNA, 21 nt, synthetic construct
  misc_feature 1..21: note = Synthetic
  source 1..21: mol_type = other RNA
agagggcgtactctaccccag

SEQ ID NO: 5262 - RNA, 21 nt, synthetic construct
  misc_feature 1..21: note = Synthetic
  source 1..21: mol_type = other RNA
gagggcgtactctaccccaga

SEQ ID NO: 5263 - RNA, 21 nt, synthetic construct
  misc_feature 1..21: note = Synthetic
  source 1..21: mol_type = other RNA
agggcgtactctaccccagag

SEQ ID NO: 5264 - RNA, 21 nt, synthetic construct
  misc_feature 1..21: note = Synthetic
  source 1..21: mol_type = other RNA
gggcgtactctaccccagaga

SEQ ID NO: 5265 - RNA, 21 nt, synthetic construct
  misc_feature 1..21: note = Synthetic
  source 1..21: mol_type = other RNA
ggcgtactctaccccagagag

SEQ ID NO: 5266 - RNA, 21 nt, synthetic construct
  misc_feature 1..21: note = Synthetic
  source 1..21: mol_type = other RNA
gcgtactctaccccagagagg

SEQ ID NO: 5267 - RNA, 21 nt, synthetic construct
  misc_feature 1..21: note = Synthetic
  source 1..21: mol_type = other RNA
cgtactctaccccagagaggg

SEQ ID NO: 5268 - RNA, 21 nt, synthetic construct
  misc_feature 1..21: note = Synthetic
  source 1..21: mol_type = other RNA
gtactctaccccagagaggga

SEQ ID NO: 5269 - RNA, 21 nt, synthetic construct
  misc_feature 1..21: note = Synthetic
  source 1..21: mol_type = other RNA
tactctaccccagagagggaa

SEQ ID NO: 5270 - RNA, 21 nt, synthetic construct
  misc_feature 1..21: note = Synthetic
  source 1..21: mol_type = other RNA
actctaccccagagagggaaa

SEQ ID NO: 5271 - RNA, 21 nt, synthetic construct
  misc_feature 1..21: note = Synthetic
  source 1..21: mol_type = other RNA
ctctaccccagagagggaaac

SEQ ID NO: 5272 - RNA, 21 nt, synthetic construct
  misc_feature 1..21: note = Synthetic
  source 1..21: mol_type = other RNA
tctaccccagagagggaaaca

SEQ ID NO: 5273 - RNA, 21 nt, synthetic construct
  misc_feature 1..21: note = Synthetic
  source 1..21: mol_type = other RNA
ctaccccagagagggaaacac

SEQ ID NO: 5274 - RNA, 21 nt, synthetic construct
  misc_feature 1..21: note = Synthetic
  source 1..21: mol_type = other RNA
taccccagagagggaaacacc

SEQ ID NO: 5275 - DNA, 21 bp, synthetic construct
  misc_feature 1..21: note = Synthetic
  source 1..21: mol_type = other DNA
accccagagagggaaacacca

SEQ ID NO: 5276 - RNA, 21 nt, synthetic construct
  misc_feature 1..21: note = Synthetic
  source 1..21: mol_type = other RNA
ccccagagagggaaacaccat

SEQ ID NO: 5277 - RNA, 21 nt, synthetic construct
  misc_feature 1..21: note = Synthetic
  source 1..21: mol_type = other RNA
cccagagagggaaacaccatg

SEQ ID NO: 5278 - RNA, 21 nt, synthetic construct
  misc_feature 1..21: note = Synthetic
  source 1..21: mol_type = other RNA
ccagagagggaaacaccatgc

SEQ ID NO: 5279 - RNA, 21 nt, synthetic construct
  misc_feature 1..21: note = Synthetic
  source 1..21: mol_type = other RNA
cagagagggaaacaccatgcc

SEQ ID NO: 5280 - RNA, 21 nt, synthetic construct
  misc_feature 1..21: note = Synthetic
  source 1..21: mol_type = other RNA
agagagggaaacaccatgccc

SEQ ID NO: 5281 - RNA, 21 nt, synthetic construct
  misc_feature 1..21: note = Synthetic
  source 1..21: mol_type = other RNA
gagagggaaacaccatgccca

SEQ ID NO: 5282 - RNA, 21 nt, synthetic construct
  misc_feature 1..21: note = Synthetic
  source 1..21: mol_type = other RNA
agagggaaacaccatgcccac

SEQ ID NO: 5283 - RNA, 21 nt, synthetic construct
  misc_feature 1..21: note = Synthetic
  source 1..21: mol_type = other RNA
gagggaaacaccatgcccaca

SEQ ID NO: 5284 - RNA, 21 nt, synthetic construct
  misc_feature 1..21: note = Synthetic
  source 1..21: mol_type = other RNA
agggaaacaccatgcccacag

SEQ ID NO: 5285 - RNA, 21 nt, synthetic construct
  misc_feature 1..21: note = Synthetic
  source 1..21: mol_type = other RNA
gggaaacaccatgcccacagt

SEQ ID NO: 5286 - RNA, 21 nt, synthetic construct
  misc_feature 1..21: note = Synthetic
  source 1..21: mol_type = other RNA
ggaaacaccatgcccacagtg

SEQ ID NO: 5287 - RNA, 21 nt, synthetic construct
  misc_feature 1..21: note = Synthetic
  source 1..21: mol_type = other RNA
gaaacaccatgcccacagtgc

SEQ ID NO: 5288 - RNA, 21 nt, synthetic construct
  misc_feature 1..21: note = Synthetic
  source 1..21: mol_type = other RNA
aaacaccatgcccacagtgct

SEQ ID NO: 5289 - RNA, 21 nt, synthetic construct
  misc_feature 1..21: note = Synthetic
  source 1..21: mol_type = other RNA
aacaccatgcccacagtgctt

SEQ ID NO: 5290 - RNA, 21 nt, synthetic construct
  misc_feature 1..21: note = Synthetic
  source 1..21: mol_type = other RNA
acaccatgcccacagtgcttg

SEQ ID NO: 5291 - RNA, 21 nt, synthetic construct
  misc_feature 1..21: note = Synthetic
  source 1..21: mol_type = other RNA
caccatgcccacagtgcttgg

SEQ ID NO: 5292 - RNA, 21 nt, synthetic construct
  misc_feature 1..21: note = Synthetic
  source 1..21: mol_type = other RNA
accatgcccacagtgcttggt

SEQ ID NO: 5293 - RNA, 21 nt, synthetic construct
  misc_feature 1..21: note = Synthetic
  source 1..21: mol_type = other RNA
ccatgcccacagtgcttggtt

SEQ ID NO: 5294 - RNA, 21 nt, synthetic construct
  misc_feature 1..21: note = Synthetic
  source 1..21: mol_type = other RNA
catgcccacagtgcttggttt

SEQ ID NO: 5295 - RNA, 21 nt, synthetic construct
  misc_feature 1..21: note = Synthetic
  source 1..21: mol_type = other RNA
atgcccacagtgcttggtttt

SEQ ID NO: 5296 - RNA, 21 nt, synthetic construct
  misc_feature 1..21: note = Synthetic
  source 1..21: mol_type = other RNA
tgcccacagtgcttggttttg

SEQ ID NO: 5297 - RNA, 21 nt, synthetic construct
  misc_feature 1..21: note = Synthetic
  source 1..21: mol_type = other RNA
gcccacagtgcttggttttgc

SEQ ID NO: 5298 - RNA, 21 nt, synthetic construct
  misc_feature 1..21: note = Synthetic
  source 1..21: mol_type = other RNA
cccacagtgcttggttttgca

SEQ ID NO: 5299 - RNA, 21 nt, synthetic construct
  misc_feature 1..21: note = Synthetic
  source 1..21: mol_type = other RNA
ccacagtgcttggttttgcac

SEQ ID NO: 5300 - RNA, 21 nt, synthetic construct
  misc_feature 1..21: note = Synthetic
  source 1..21: mol_type = other RNA
cacagtgcttggttttgcact

SEQ ID NO: 5301 - RNA, 21 nt, synthetic construct
  misc_feature 1..21: note = Synthetic
  source 1..21: mol_type = other RNA
acagtgcttggttttgcactc

SEQ ID NO: 5302 - RNA, 21 nt, synthetic construct
  misc_feature 1..21: note = Synthetic
  source 1..21: mol_type = other RNA
cagtgcttggttttgcactca

SEQ ID NO: 5303 - RNA, 21 nt, synthetic construct
  misc_feature 1..21: note = Synthetic
  source 1..21: mol_type = other RNA
agtgcttggttttgcactcag

SEQ ID NO: 5304 - RNA, 21 nt, synthetic construct
  misc_feature 1..21: note = Synthetic
  source 1..21: mol_type = other RNA
gtgcttggttttgcactcagg

SEQ ID NO: 5305 - RNA, 21 nt, synthetic construct
  misc_feature 1..21: note = Synthetic
  source 1..21: mol_type = other RNA
tgcttggttttgcactcaggt

SEQ ID NO: 5306 - RNA, 21 nt, synthetic construct
  misc_feature 1..21: note = Synthetic
  source 1..21: mol_type = other RNA
gcttggttttgcactcaggtg

SEQ ID NO: 5307 - RNA, 21 nt, synthetic construct
  misc_feature 1..21: note = Synthetic
  source 1..21: mol_type = other RNA
cttggttttgcactcaggtgt

SEQ ID NO: 5308 - RNA, 21 nt, synthetic construct
  misc_feature 1..21: note = Synthetic
  source 1..21: mol_type = other RNA
ttggttttgcactcaggtgtg

SEQ ID NO: 5309 - RNA, 21 nt, synthetic construct
  misc_feature 1..21: note = Synthetic
  source 1..21: mol_type = other RNA
tggttttgcactcaggtgtgc

SEQ ID NO: 5310 - RNA, 21 nt, synthetic construct
  misc_feature 1..21: note = Synthetic
  source 1..21: mol_type = other RNA
ggttttgcactcaggtgtgcg

SEQ ID NO: 5311 - RNA, 21 nt, synthetic construct
  misc_feature 1..21: note = Synthetic
  source 1..21: mol_type = other RNA
gttttgcactcaggtgtgcgg

SEQ ID NO: 5312 - RNA, 21 nt, synthetic construct
  misc_feature 1..21: note = Synthetic
  source 1..21: mol_type = other RNA
ttttgcactcaggtgtgcggg

SEQ ID NO: 5313 - RNA, 21 nt, synthetic construct
  misc_feature 1..21: note = Synthetic
  source 1..21: mol_type = other RNA
tttgcactcaggtgtgcgggc

SEQ ID NO: 5314 - RNA, 21 nt, synthetic construct
  misc_feature 1..21: note = Synthetic
  source 1..21: mol_type = other RNA
ttgcactcaggtgtgcgggca

SEQ ID NO: 5315 - RNA, 21 nt, synthetic construct
  misc_feature 1..21: note = Synthetic
  source 1..21: mol_type = other RNA
tgcactcaggtgtgcgggcag

SEQ ID NO: 5316 - RNA, 21 nt, synthetic construct
  misc_feature 1..21: note = Synthetic
  source 1..21: mol_type = other RNA
gcactcaggtgtgcgggcagc

SEQ ID NO: 5317 - RNA, 21 nt, synthetic construct
  misc_feature 1..21: note = Synthetic
  source 1..21: mol_type = other RNA
cactcaggtgtgcgggcagca

SEQ ID NO: 5318 - RNA, 21 nt, synthetic construct
  misc_feature 1..21: note = Synthetic
  source 1..21: mol_type = other RNA
actcaggtgtgcgggcagcac

SEQ ID NO: 5319 - RNA, 21 nt, synthetic construct
  misc_feature 1..21: note = Synthetic
  source 1..21: mol_type = other RNA
ctcaggtgtgcgggcagcaca

SEQ ID NO: 5320 - RNA, 21 nt, synthetic construct
  misc_feature 1..21: note = Synthetic
  source 1..21: mol_type = other RNA
tcaggtgtgcgggcagcacag

SEQ ID NO: 5321 - RNA, 21 nt, synthetic construct
  misc_feature 1..21: note = Synthetic
  source 1..21: mol_type = other RNA
caggtgtgcgggcagcacagc

SEQ ID NO: 5322 - RNA, 21 nt, synthetic construct
  misc_feature 1..21: note = Synthetic
  source 1..21: mol_type = other RNA
aggtgtgcgggcagcacagca

SEQ ID NO: 5323 - RNA, 21 nt, synthetic construct
  misc_feature 1..21: note = Synthetic
  source 1..21: mol_type = other RNA
ggtgtgcgggcagcacagcag

SEQ ID NO: 5324 - RNA, 21 nt, synthetic construct
  misc_feature 1..21: note = Synthetic
  source 1..21: mol_type = other RNA
gtgtgcgggcagcacagcagg

SEQ ID NO: 5325 - RNA, 21 nt, synthetic construct
  misc_feature 1..21: note = Synthetic
  source 1..21: mol_type = other RNA
tgtgcgggcagcacagcaggc

SEQ ID NO: 5326 - RNA, 21 nt, synthetic construct
  misc_feature 1..21: note = Synthetic
  source 1..21: mol_type = other RNA
gtgcgggcagcacagcaggcc

SEQ ID NO: 5327 - RNA, 21 nt, synthetic construct
  misc_feature 1..21: note = Synthetic
  source 1..21: mol_type = other RNA
tgcgggcagcacagcaggcct

SEQ ID NO: 5328 - RNA, 21 nt, synthetic construct
  misc_feature 1..21: note = Synthetic
  source 1..21: mol_type = other RNA
gcgggcagcacagcaggcctc

SEQ ID NO: 5329 - RNA, 21 nt, synthetic construct
  misc_feature 1..21: note = Synthetic
  source 1..21: mol_type = other RNA
cgggcagcacagcaggcctca

SEQ ID NO: 5330 - RNA, 21 nt, synthetic construct
  misc_feature 1..21: note = Synthetic
  source 1..21: mol_type = other RNA
gggcagcacagcaggcctcac

SEQ ID NO: 5331 - RNA, 21 nt, synthetic construct
  misc_feature 1..21: note = Synthetic
  source 1..21: mol_type = other RNA
ggcagcacagcaggcctcacc

SEQ ID NO: 5332 - RNA, 21 nt, synthetic construct
  misc_feature 1..21: note = Synthetic
  source 1..21: mol_type = other RNA
gcagcacagcaggcctcacct

SEQ ID NO: 5333 - RNA, 21 nt, synthetic construct
  misc_feature 1..21: note = Synthetic
  source 1..21: mol_type = other RNA
cagcacagcaggcctcacctt

SEQ ID NO: 5334 - RNA, 21 nt, synthetic construct
  misc_feature 1..21: note = Synthetic
  source 1..21: mol_type = other RNA
agcacagcaggcctcaccttg

SEQ ID NO: 5335 - RNA, 21 nt, synthetic construct
  misc_feature 1..21: note = Synthetic
  source 1..21: mol_type = other RNA
gcacagcaggcctcaccttgc

SEQ ID NO: 5336 - RNA, 21 nt, synthetic construct
  misc_feature 1..21: note = Synthetic
  source 1..21: mol_type = other RNA
cacagcaggcctcaccttgca

SEQ ID NO: 5337 - RNA, 21 nt, synthetic construct
  misc_feature 1..21: note = Synthetic
  source 1..21: mol_type = other RNA
acagcaggcctcaccttgcag

SEQ ID NO: 5338 - RNA, 21 nt, synthetic construct
  misc_feature 1..21: note = Synthetic
  source 1..21: mol_type = other RNA
cagcaggcctcaccttgcagc

SEQ ID NO: 5339 - RNA, 21 nt, synthetic construct
  misc_feature 1..21: note = Synthetic
  source 1..21: mol_type = other RNA
agcaggcctcaccttgcagca

SEQ ID NO: 5340 - RNA, 21 nt, synthetic construct
  misc_feature 1..21: note = Synthetic
  source 1..21: mol_type = other RNA
gcaggcctcaccttgcagcac

SEQ ID NO: 5341 - RNA, 21 nt, synthetic construct
  misc_feature 1..21: note = Synthetic
  source 1..21: mol_type = other RNA
caggcctcaccttgcagcact

SEQ ID NO: 5342 - RNA, 21 nt, synthetic construct
  misc_feature 1..21: note = Synthetic
  source 1..21: mol_type = other RNA
aggcctcaccttgcagcactc

SEQ ID NO: 5343 - RNA, 21 nt, synthetic construct
  misc_feature 1..21: note = Synthetic
  source 1..21: mol_type = other RNA
ggcctcaccttgcagcactct

SEQ ID NO: 5344 - RNA, 21 nt, synthetic construct
  misc_feature 1..21: note = Synthetic
  source 1..21: mol_type = other RNA
gcctcaccttgcagcactctg

SEQ ID NO: 5345 - RNA, 21 nt, synthetic construct
  misc_feature 1..21: note = Synthetic
  source 1..21: mol_type = other RNA
cctcaccttgcagcactctgg

SEQ ID NO: 5346 - RNA, 21 nt, synthetic construct
  misc_feature 1..21: note = Synthetic
  source 1..21: mol_type = other RNA
ctcaccttgcagcactctggg

SEQ ID NO: 5347 - RNA, 21 nt, synthetic construct
  misc_feature 1..21: note = Synthetic
  source 1..21: mol_type = other RNA
tcaccttgcagcactctgggc

SEQ ID NO: 5348 - RNA, 21 nt, synthetic construct
  misc_feature 1..21: note = Synthetic
  source 1..21: mol_type = other RNA
caccttgcagcactctgggca

SEQ ID NO: 5349 - RNA, 21 nt, synthetic construct
  misc_feature 1..21: note = Synthetic
  source 1..21: mol_type = other RNA
accttgcagcactctgggcac

SEQ ID NO: 5350 - RNA, 21 nt, synthetic construct
  misc_feature 1..21: note = Synthetic
  source 1..21: mol_type = other RNA
ccttgcagcactctgggcaca

SEQ ID NO: 5351 - RNA, 21 nt, synthetic construct
  misc_feature 1..21: note = Synthetic
  source 1..21: mol_type = other RNA
cttgcagcactctgggcacaa

SEQ ID NO: 5352 - RNA, 21 nt, synthetic construct
  misc_feature 1..21: note = Synthetic
  source 1..21: mol_type = other RNA
ttgcagcactctgggcacaat

SEQ ID NO: 5353 - RNA, 21 nt, synthetic construct
  misc_feature 1..21: note = Synthetic
  source 1..21: mol_type = other RNA
tgcagcactctgggcacaatg

SEQ ID NO: 5354 - RNA, 21 nt, synthetic construct
  misc_feature 1..21: note = Synthetic
  source 1..21: mol_type = other RNA
gcagcactctgggcacaatga

SEQ ID NO: 5355 - RNA, 21 nt, synthetic construct
  misc_feature 1..21: note = Synthetic
  source 1..21: mol_type = other RNA
cagcactctgggcacaatgac

SEQ ID NO: 5356 - RNA, 21 nt, synthetic construct
  misc_feature 1..21: note = Synthetic
  source 1..21: mol_type = other RNA
agcactctgggcacaatgaca

SEQ ID NO: 5357 - RNA, 21 nt, synthetic construct
  misc_feature 1..21: note = Synthetic
  source 1..21: mol_type = other RNA
gcactctgggcacaatgacac

SEQ ID NO: 5358 - RNA, 21 nt, synthetic construct
  misc_feature 1..21: note = Synthetic
  source 1..21: mol_type = other RNA
cactctgggcacaatgacact

SEQ ID NO: 5359 - RNA, 21 nt, synthetic construct
  misc_feature 1..21: note = Synthetic
  source 1..21: mol_type = other RNA
actctgggcacaatgacactg

SEQ ID NO: 5360 - RNA, 21 nt, synthetic construct
  misc_feature 1..21: note = Synthetic
  source 1..21: mol_type = other RNA
ctctgggcacaatgacactgt

SEQ ID NO: 5361 - RNA, 21 nt, synthetic construct
  misc_feature 1..21: note = Synthetic
  source 1..21: mol_type = other RNA
tctgggcacaatgacactgtc

SEQ ID NO: 5362 - RNA, 21 nt, synthetic construct
  misc_feature 1..21: note = Synthetic
  source 1..21: mol_type = other RNA
ctgggcacaatgacactgtcc

SEQ ID NO: 5363 - RNA, 21 nt, synthetic construct
  misc_feature 1..21: note = Synthetic
  source 1..21: mol_type = other RNA
tgggcacaatgacactgtcca

SEQ ID NO: 5364 - RNA, 21 nt, synthetic construct
  misc_feature 1..21: note = Synthetic
  source 1..21: mol_type = other RNA
gggcacaatgacactgtccac

SEQ ID NO: 5365 - RNA, 21 nt, synthetic construct
  misc_feature 1..21: note = Synthetic
  source 1..21: mol_type = other RNA
ggcacaatgacactgtccact

SEQ ID NO: 5366 - RNA, 21 nt, synthetic construct
  misc_feature 1..21: note = Synthetic
  source 1..21: mol_type = other RNA
gcacaatgacactgtccactg

SEQ ID NO: 5367 - RNA, 21 nt, synthetic construct
  misc_feature 1..21: note = Synthetic
  source 1..21: mol_type = other RNA
cacaatgacactgtccactgg

SEQ ID NO: 5368 - RNA, 21 nt, synthetic construct
  misc_feature 1..21: note = Synthetic
  source 1..21: mol_type = other RNA
acaatgacactgtccactggg

SEQ ID NO: 5369 - RNA, 21 nt, synthetic construct
  misc_feature 1..21: note = Synthetic
  source 1..21: mol_type = other RNA
caatgacactgtccactgggg

SEQ ID NO: 5370 - RNA, 21 nt, synthetic construct
  misc_feature 1..21: note = Synthetic
  source 1..21: mol_type = other RNA
aatgacactgtccactgggga

SEQ ID NO: 5371 - RNA, 21 nt, synthetic construct
  misc_feature 1..21: note = Synthetic
  source 1..21: mol_type = other RNA
atgacactgtccactggggag

SEQ ID NO: 5372 - RNA, 21 nt, synthetic construct
  misc_feature 1..21: note = Synthetic
  source 1..21: mol_type = other RNA
tgacactgtccactggggagc

SEQ ID NO: 5373 - RNA, 21 nt, synthetic construct
  misc_feature 1..21: note = Synthetic
  source 1..21: mol_type = other RNA
gacactgtccactggggagct

SEQ ID NO: 5374 - RNA, 21 nt, synthetic construct
  misc_feature 1..21: note = Synthetic
  source 1..21: mol_type = other RNA
acactgtccactggggagctg

SEQ ID NO: 5375 - RNA, 21 nt, synthetic construct
  misc_feature 1..21: note = Synthetic
  source 1..21: mol_type = other RNA
cactgtccactggggagctgc

SEQ ID NO: 5376 - RNA, 21 nt, synthetic construct
  misc_feature 1..21: note = Synthetic
  source 1..21: mol_type = other RNA
actgtccactggggagctgca

SEQ ID NO: 5377 - RNA, 21 nt, synthetic construct
  misc_feature 1..21: note = Synthetic
  source 1..21: mol_type = other RNA
ctgtccactggggagctgcag

SEQ ID NO: 5378 - RNA, 21 nt, synthetic construct
  misc_feature 1..21: note = Synthetic
  source 1..21: mol_type = other RNA
tgtccactggggagctgcaga

SEQ ID NO: 5379 - RNA, 21 nt, synthetic construct
  misc_feature 1..21: note = Synthetic
  source 1..21: mol_type = other RNA
gtccactggggagctgcagag

SEQ ID NO: 5380 - RNA, 21 nt, synthetic construct
  misc_feature 1..21: note = Synthetic
  source 1..21: mol_type = other RNA
tccactggggagctgcagagc

SEQ ID NO: 5381 - RNA, 21 nt, synthetic construct
  misc_feature 1..21: note = Synthetic
  source 1..21: mol_type = other RNA
ccactggggagctgcagagct

SEQ ID NO: 5382 - RNA, 21 nt, synthetic construct
  misc_feature 1..21: note = Synthetic
  source 1..21: mol_type = other RNA
cactggggagctgcagagctt

SEQ ID NO: 5383 - RNA, 21 nt, synthetic construct
  misc_feature 1..21: note = Synthetic
  source 1..21: mol_type = other RNA
actggggagctgcagagctta

SEQ ID NO: 5384 - RNA, 21 nt, synthetic construct
  misc_feature 1..21: note = Synthetic
  source 1..21: mol_type = other RNA
ctggggagctgcagagcttag

SEQ ID NO: 5385 - RNA, 21 nt, synthetic construct
  misc_feature 1..21: note = Synthetic
  source 1..21: mol_type = other RNA
tggggagctgcagagcttagc

SEQ ID NO: 5386 - RNA, 21 nt, synthetic construct
  misc_feature 1..21: note = Synthetic
  source 1..21: mol_type = other RNA
ggggagctgcagagcttagca

SEQ ID NO: 5387 - RNA, 21 nt, synthetic construct
  misc_feature 1..21: note = Synthetic
  source 1..21: mol_type = other RNA
gggagctgcagagcttagcag

SEQ ID NO: 5388 - RNA, 21 nt, synthetic construct
  misc_feature 1..21: note = Synthetic
  source 1..21: mol_type = other RNA
ggagctgcagagcttagcagc

SEQ ID NO: 5389 - RNA, 21 nt, synthetic construct
  misc_feature 1..21: note = Synthetic
  source 1..21: mol_type = other RNA
gagctgcagagcttagcagct

SEQ ID NO: 5390 - RNA, 21 nt, synthetic construct
  misc_feature 1..21: note = Synthetic
  source 1..21: mol_type = other RNA
agctgcagagcttagcagctg

SEQ ID NO: 5391 - RNA, 21 nt, synthetic construct
  misc_feature 1..21: note = Synthetic
  source 1..21: mol_type = other RNA
gctgcagagcttagcagctgg

SEQ ID NO: 5392 - RNA, 21 nt, synthetic construct
  misc_feature 1..21: note = Synthetic
  source 1..21: mol_type = other RNA
ctgcagagcttagcagctggc

SEQ ID NO: 5393 - RNA, 21 nt, synthetic construct
  misc_feature 1..21: note = Synthetic
  source 1..21: mol_type = other RNA
tgcagagcttagcagctggct

SEQ ID NO: 5394 - RNA, 21 nt, synthetic construct
  misc_feature 1..21: note = Synthetic
  source 1..21: mol_type = other RNA
gcagagcttagcagctggctg

SEQ ID NO: 5395 - RNA, 21 nt, synthetic construct
  misc_feature 1..21: note = Synthetic
  source 1..21: mol_type = other RNA
cagagcttagcagctggctgg

SEQ ID NO: 5396 - RNA, 21 nt, synthetic construct
  misc_feature 1..21: note = Synthetic
  source 1..21: mol_type = other RNA
agagcttagcagctggctggg

SEQ ID NO: 5397 - RNA, 21 nt, synthetic construct
  misc_feature 1..21: note = Synthetic
  source 1..21: mol_type = other RNA
gagcttagcagctggctgggt

SEQ ID NO: 5398 - RNA, 21 nt, synthetic construct
  misc_feature 1..21: note = Synthetic
  source 1..21: mol_type = other RNA
agcttagcagctggctgggtc

SEQ ID NO: 5399 - RNA, 21 nt, synthetic construct
  misc_feature 1..21: note = Synthetic
  source 1..21: mol_type = other RNA
gcttagcagctggctgggtct

SEQ ID NO: 5400 - RNA, 21 nt, synthetic construct
  misc_feature 1..21: note = Synthetic
  source 1..21: mol_type = other RNA
cttagcagctggctgggtctg

SEQ ID NO: 5401 - RNA, 21 nt, synthetic construct
  misc_feature 1..21: note = Synthetic
  source 1..21: mol_type = other RNA
ttagcagctggctgggtctgc

SEQ ID NO: 5402 - RNA, 21 nt, synthetic construct
  misc_feature 1..21: note = Synthetic
  source 1..21: mol_type = other RNA
tagcagctggctgggtctgcc

SEQ ID NO: 5403 - RNA, 21 nt, synthetic construct
  misc_feature 1..21: note = Synthetic
  source 1..21: mol_type = other RNA
agcagctggctgggtctgccc

SEQ ID NO: 5404 - RNA, 21 nt, synthetic construct
  misc_feature 1..21: note = Synthetic
  source 1..21: mol_type = other RNA
gcagctggctgggtctgccct

SEQ ID NO: 5405 - RNA, 21 nt, synthetic construct
  misc_feature 1..21: note = Synthetic
  source 1..21: mol_type = other RNA
cagctggctgggtctgccctc

SEQ ID NO: 5406 - RNA, 21 nt, synthetic construct
  misc_feature 1..21: note = Synthetic
  source 1..21: mol_type = other RNA
agctggctgggtctgccctcg

SEQ ID NO: 5407 - RNA, 21 nt, synthetic construct
  misc_feature 1..21: note = Synthetic
  source 1..21: mol_type = other RNA
gctggctgggtctgccctcgg

SEQ ID NO: 5408 - RNA, 21 nt, synthetic construct
  misc_feature 1..21: note = Synthetic
  source 1..21: mol_type = other RNA
ctggctgggtctgccctcggg

SEQ ID NO: 5409 - RNA, 21 nt, synthetic construct
  misc_feature 1..21: note = Synthetic
  source 1..21: mol_type = other RNA
tggctgggtctgccctcgggg

SEQ ID NO: 5410 - RNA, 21 nt, synthetic construct
  misc_feature 1..21: note = Synthetic
  source 1..21: mol_type = other RNA
ggctgggtctgccctcggggg

SEQ ID NO: 5411 - RNA, 21 nt, synthetic construct
  misc_feature 1..21: note = Synthetic
  source 1..21: mol_type = other RNA
gctgggtctgccctcggggga

SEQ ID NO: 5412 - RNA, 21 nt, synthetic construct
  misc_feature 1..21: note = Synthetic
  source 1..21: mol_type = other RNA
ctgggtctgccctcgggggag

SEQ ID NO: 5413 - RNA, 21 nt, synthetic construct
  misc_feature 1..21: note = Synthetic
  source 1..21: mol_type = other RNA
tgggtctgccctcgggggagg

SEQ ID NO: 5414 - RNA, 21 nt, synthetic construct
  misc_feature 1..21: note = Synthetic
  source 1..21: mol_type = other RNA
gggtctgccctcgggggaggg

SEQ ID NO: 5415 - RNA, 21 nt, synthetic construct
  misc_feature 1..21: note = Synthetic
  source 1..21: mol_type = other RNA
ggtctgccctcgggggagggg

SEQ ID NO: 5416 - RNA, 21 nt, synthetic construct
  misc_feature 1..21: note = Synthetic
  source 1..21: mol_type = other RNA
gtctgccctcgggggagggga

SEQ ID NO: 5417 - RNA, 21 nt, synthetic construct
  misc_feature 1..21: note = Synthetic
  source 1..21: mol_type = other RNA
tctgccctcgggggaggggag

SEQ ID NO: 5418 - RNA, 21 nt, synthetic construct
  misc_feature 1..21: note = Synthetic
  source 1..21: mol_type = other RNA
ctgccctcgggggaggggagg

SEQ ID NO: 5419 - RNA, 21 nt, synthetic construct
  misc_feature 1..21: note = Synthetic
  source 1..21: mol_type = other RNA
tgccctcgggggaggggagga

SEQ ID NO: 5420 - RNA, 21 nt, synthetic construct
  misc_feature 1..21: note = Synthetic
  source 1..21: mol_type = other RNA
gccctcgggggaggggaggag

SEQ ID NO: 5421 - RNA, 21 nt, synthetic construct
  misc_feature 1..21: note = Synthetic
  source 1..21: mol_type = other RNA
ccctcgggggaggggaggagt

SEQ ID NO: 5422 - RNA, 21 nt, synthetic construct
  misc_feature 1..21: note = Synthetic
  source 1..21: mol_type = other RNA
cctcgggggaggggaggagtt

SEQ ID NO: 5423 - RNA, 21 nt, synthetic construct
  misc_feature 1..21: note = Synthetic
  source 1..21: mol_type = other RNA
ctcgggggaggggaggagttt

SEQ ID NO: 5424 - RNA, 21 nt, synthetic construct
  misc_feature 1..21: note = Synthetic
  source 1..21: mol_type = other RNA
tcgggggaggggaggagtttg

SEQ ID NO: 5425 - RNA, 21 nt, synthetic construct
  misc_feature 1..21: note = Synthetic
  source 1..21: mol_type = other RNA
cgggggaggggaggagtttgc

SEQ ID NO: 5426 - RNA, 21 nt, synthetic construct
  misc_feature 1..21: note = Synthetic
  source 1..21: mol_type = other RNA
gggggaggggaggagtttgca

SEQ ID NO: 5427 - RNA, 21 nt, synthetic construct
  misc_feature 1..21: note = Synthetic
  source 1..21: mol_type = other RNA
ggggaggggaggagtttgcaa

SEQ ID NO: 5428 - RNA, 21 nt, synthetic construct
  misc_feature 1..21: note = Synthetic
  source 1..21: mol_type = other RNA
gggaggggaggagtttgcaaa

SEQ ID NO: 5429 - RNA, 21 nt, synthetic construct
  misc_feature 1..21: note = Synthetic
  source 1..21: mol_type = other RNA
ggaggggaggagtttgcaaaa

SEQ ID NO: 5430 - RNA, 21 nt, synthetic construct
  misc_feature 1..21: note = Synthetic
  source 1..21: mol_type = other RNA
gaggggaggagtttgcaaaaa

SEQ ID NO: 5431 - RNA, 21 nt, synthetic construct
  misc_feature 1..21: note = Synthetic
  source 1..21: mol_type = other RNA
aggggaggagtttgcaaaaaa

SEQ ID NO: 5432 - RNA, 21 nt, synthetic construct
  misc_feature 1..21: note = Synthetic
  source 1..21: mol_type = other RNA
ggggaggagtttgcaaaaaaa

SEQ ID NO: 5433 - RNA, 21 nt, synthetic construct
  misc_feature 1..21: note = Synthetic
  source 1..21: mol_type = other RNA
gggaggagtttgcaaaaaaag

SEQ ID NO: 5434 - RNA, 21 nt, synthetic construct
  misc_feature 1..21: note = Synthetic
  source 1..21: mol_type = other RNA
ggaggagtttgcaaaaaaagg

SEQ ID NO: 5435 - RNA, 21 nt, synthetic construct
  misc_feature 1..21: note = Synthetic
  source 1..21: mol_type = other RNA
gaggagtttgcaaaaaaagga

SEQ ID NO: 5436 - RNA, 21 nt, synthetic construct
  misc_feature 1..21: note = Synthetic
  source 1..21: mol_type = other RNA
aggagtttgcaaaaaaaggag

SEQ ID NO: 5437 - RNA, 21 nt, synthetic construct
  misc_feature 1..21: note = Synthetic
  source 1..21: mol_type = other RNA
ggagtttgcaaaaaaaggagg

SEQ ID NO: 5438 - RNA, 21 nt, synthetic construct
  misc_feature 1..21: note = Synthetic
  source 1..21: mol_type = other RNA
gagtttgcaaaaaaaggaggc

SEQ ID NO: 5439 - RNA, 21 nt, synthetic construct
  misc_feature 1..21: note = Synthetic
  source 1..21: mol_type = other RNA
agtttgcaaaaaaaggaggcc

SEQ ID NO: 5440 - RNA, 21 nt, synthetic construct
  misc_feature 1..21: note = Synthetic
  source 1..21: mol_type = other RNA
gtttgcaaaaaaaggaggccc

SEQ ID NO: 5441 - RNA, 21 nt, synthetic construct
  misc_feature 1..21: note = Synthetic
  source 1..21: mol_type = other RNA
tttgcaaaaaaaggaggccct

SEQ ID NO: 5442 - RNA, 21 nt, synthetic construct
  misc_feature 1..21: note = Synthetic
  source 1..21: mol_type = other RNA
ttgcaaaaaaaggaggccctg

SEQ ID NO: 5443 - RNA, 21 nt, synthetic construct
  misc_feature 1..21: note = Synthetic
  source 1..21: mol_type = other RNA
tgcaaaaaaaggaggccctga

SEQ ID NO: 5444 - RNA, 21 nt, synthetic construct
  misc_feature 1..21: note = Synthetic
  source 1..21: mol_type = other RNA
gcaaaaaaaggaggccctgag

SEQ ID NO: 5445 - RNA, 21 nt, synthetic construct
  misc_feature 1..21: note = Synthetic
  source 1..21: mol_type = other RNA
caaaaaaaggaggccctgagg

SEQ ID NO: 5446 - RNA, 21 nt, synthetic construct
  misc_feature 1..21: note = Synthetic
  source 1..21: mol_type = other RNA
aaaaaaaggaggccctgaggt

SEQ ID NO: 5447 - RNA, 21 nt, synthetic construct
  misc_feature 1..21: note = Synthetic
  source 1..21: mol_type = other RNA
aaaaaaggaggccctgaggtg

SEQ ID NO: 5448 - RNA, 21 nt, synthetic construct
  misc_feature 1..21: note = Synthetic
  source 1..21: mol_type = other RNA
aaaaaggaggccctgaggtga

SEQ ID NO: 5449 - RNA, 21 nt, synthetic construct
  misc_feature 1..21: note = Synthetic
  source 1..21: mol_type = other RNA
aaaaggaggccctgaggtgag

SEQ ID NO: 5450 - RNA, 21 nt, synthetic construct
  misc_feature 1..21: note = Synthetic
  source 1..21: mol_type = other RNA
aaaggaggccctgaggtgagg

SEQ ID NO: 5451 - RNA, 21 nt, synthetic construct
  misc_feature 1..21: note = Synthetic
  source 1..21: mol_type = other RNA
aaggaggccctgaggtgagga

SEQ ID NO: 5452 - RNA, 21 nt, synthetic construct
  misc_feature 1..21: note = Synthetic
  source 1..21: mol_type = other RNA
aggaggccctgaggtgaggat

SEQ ID NO: 5453 - RNA, 21 nt, synthetic construct
  misc_feature 1..21: note = Synthetic
  source 1..21: mol_type = other RNA
ggaggccctgaggtgaggata

SEQ ID NO: 5454 - RNA, 21 nt, synthetic construct
  misc_feature 1..21: note = Synthetic
  source 1..21: mol_type = other RNA
gaggccctgaggtgaggatat

SEQ ID NO: 5455 - RNA, 21 nt, synthetic construct
  misc_feature 1..21: note = Synthetic
  source 1..21: mol_type = other RNA
aggccctgaggtgaggatatc

SEQ ID NO: 5456 - RNA, 21 nt, synthetic construct
  misc_feature 1..21: note = Synthetic
  source 1..21: mol_type = other RNA
ggccctgaggtgaggatatct

SEQ ID NO: 5457 - RNA, 21 nt, synthetic construct
  misc_feature 1..21: note = Synthetic
  source 1..21: mol_type = other RNA
gccctgaggtgaggatatctg

SEQ ID NO: 5458 - RNA, 21 nt, synthetic construct
  misc_feature 1..21: note = Synthetic
  source 1..21: mol_type = other RNA
ccctgaggtgaggatatctgg

SEQ ID NO: 5459 - RNA, 21 nt, synthetic construct
  misc_feature 1..21: note = Synthetic
  source 1..21: mol_type = other RNA
cctgaggtgaggatatctggg

SEQ ID NO: 5460 - RNA, 21 nt, synthetic construct
  misc_feature 1..21: note = Synthetic
  source 1..21: mol_type = other RNA
ctgaggtgaggatatctgggg

SEQ ID NO: 5461 - RNA, 21 nt, synthetic construct
  misc_feature 1..21: note = Synthetic
  source 1..21: mol_type = other RNA
tgaggtgaggatatctggggg

SEQ ID NO: 5462 - RNA, 21 nt, synthetic construct
  misc_feature 1..21: note = Synthetic
  source 1..21: mol_type = other RNA
gaggtgaggatatctgggggc

SEQ ID NO: 5463 - RNA, 21 nt, synthetic construct
  misc_feature 1..21: note = Synthetic
  source 1..21: mol_type = other RNA
aggtgaggatatctgggggcc

SEQ ID NO: 5464 - RNA, 21 nt, synthetic construct
  misc_feature 1..21: note = Synthetic
  source 1..21: mol_type = other RNA
ggtgaggatatctgggggccc

SEQ ID NO: 5465 - RNA, 21 nt, synthetic construct
  misc_feature 1..21: note = Synthetic
  source 1..21: mol_type = other RNA
gtgaggatatctgggggccca

SEQ ID NO: 5466 - RNA, 21 nt, synthetic construct
  misc_feature 1..21: note = Synthetic
  source 1..21: mol_type = other RNA
tgaggatatctgggggcccac

SEQ ID NO: 5467 - RNA, 21 nt, synthetic construct
  misc_feature 1..21: note = Synthetic
  source 1..21: mol_type = other RNA
gaggatatctgggggcccacc

SEQ ID NO: 5468 - RNA, 21 nt, synthetic construct
  misc_feature 1..21: note = Synthetic
  source 1..21: mol_type = other RNA
aggatatctgggggcccacca

SEQ ID NO: 5469 - RNA, 21 nt, synthetic construct
  misc_feature 1..21: note = Synthetic
  source 1..21: mol_type = other RNA
ggatatctgggggcccaccag

SEQ ID NO: 5470 - RNA, 21 nt, synthetic construct
  misc_feature 1..21: note = Synthetic
  source 1..21: mol_type = other RNA
gatatctgggggcccaccaga

SEQ ID NO: 5471 - RNA, 21 nt, synthetic construct
  misc_feature 1..21: note = Synthetic
  source 1..21: mol_type = other RNA
atatctgggggcccaccagac

SEQ ID NO: 5472 - RNA, 21 nt, synthetic construct
  misc_feature 1..21: note = Synthetic
  source 1..21: mol_type = other RNA
tatctgggggcccaccagaca

SEQ ID NO: 5473 - RNA, 21 nt, synthetic construct
  misc_feature 1..21: note = Synthetic
  source 1..21: mol_type = other RNA
atctgggggcccaccagacag

SEQ ID NO: 5474 - RNA, 21 nt, synthetic construct
  misc_feature 1..21: note = Synthetic
  source 1..21: mol_type = other RNA
tctgggggcccaccagacagg

SEQ ID NO: 5475 - RNA, 21 nt, synthetic construct
  misc_feature 1..21: note = Synthetic
  source 1..21: mol_type = other RNA
ctgggggcccaccagacaggt

SEQ ID NO: 5476 - RNA, 21 nt, synthetic construct
  misc_feature 1..21: note = Synthetic
  source 1..21: mol_type = other RNA
tgggggcccaccagacaggtt

SEQ ID NO: 5477 - RNA, 21 nt, synthetic construct
  misc_feature 1..21: note = Synthetic
  source 1..21: mol_type = other RNA
gggggcccaccagacaggttt

SEQ ID NO: 5478 - RNA, 21 nt, synthetic construct
  misc_feature 1..21: note = Synthetic
  source 1..21: mol_type = other RNA
ggggcccaccagacaggttta

SEQ ID NO: 5479 - RNA, 21 nt, synthetic construct
  misc_feature 1..21: note = Synthetic
  source 1..21: mol_type = other RNA
gggcccaccagacaggtttaa

SEQ ID NO: 5480 - RNA, 21 nt, synthetic construct
  misc_feature 1..21: note = Synthetic
  source 1..21: mol_type = other RNA
ggcccaccagacaggtttaaa

SEQ ID NO: 5481 - RNA, 21 nt, synthetic construct
  misc_feature 1..21: note = Synthetic
  source 1..21: mol_type = other RNA
gcccaccagacaggtttaaag

SEQ ID NO: 5482 - RNA, 21 nt, synthetic construct
  misc_feature 1..21: note = Synthetic
  source 1..21: mol_type = other RNA
cccaccagacaggtttaaaga

SEQ ID NO: 5483 - RNA, 21 nt, synthetic construct
  misc_feature 1..21: note = Synthetic
  source 1..21: mol_type = other RNA
ccaccagacaggtttaaagag

SEQ ID NO: 5484 - RNA, 21 nt, synthetic construct
  misc_feature 1..21: note = Synthetic
  source 1..21: mol_type = other RNA
caccagacaggtttaaagagg

SEQ ID NO: 5485 - RNA, 21 nt, synthetic construct
  misc_feature 1..21: note = Synthetic
  source 1..21: mol_type = other RNA
accagacaggtttaaagagga

SEQ ID NO: 5486 - RNA, 21 nt, synthetic construct
  misc_feature 1..21: note = Synthetic
  source 1..21: mol_type = other RNA
ccagacaggtttaaagaggaa

SEQ ID NO: 5487 - RNA, 21 nt, synthetic construct
  misc_feature 1..21: note = Synthetic
  source 1..21: mol_type = other RNA
cagacaggtttaaagaggaaa

SEQ ID NO: 5488 - RNA, 21 nt, synthetic construct
  misc_feature 1..21: note = Synthetic
  source 1..21: mol_type = other RNA
agacaggtttaaagaggaaac

SEQ ID NO: 5489 - RNA, 21 nt, synthetic construct
  misc_feature 1..21: note = Synthetic
  source 1..21: mol_type = other RNA
gacaggtttaaagaggaaacc

SEQ ID NO: 5490 - RNA, 21 nt, synthetic construct
  misc_feature 1..21: note = Synthetic
  source 1..21: mol_type = other RNA
acaggtttaaagaggaaacct

SEQ ID NO: 5491 - RNA, 21 nt, synthetic construct
  misc_feature 1..21: note = Synthetic
  source 1..21: mol_type = other RNA
caggtttaaagaggaaacctc

SEQ ID NO: 5492 - RNA, 21 nt, synthetic construct
  misc_feature 1..21: note = Synthetic
  source 1..21: mol_type = other RNA
aggtttaaagaggaaacctct

SEQ ID NO: 5493 - RNA, 21 nt, synthetic construct
  misc_feature 1..21: note = Synthetic
  source 1..21: mol_type = other RNA
ggtttaaagaggaaacctctt

SEQ ID NO: 5494 - RNA, 21 nt, synthetic construct
  misc_feature 1..21: note = Synthetic
  source 1..21: mol_type = other RNA
gtttaaagaggaaacctcttc

SEQ ID NO: 5495 - RNA, 21 nt, synthetic construct
  misc_feature 1..21: note = Synthetic
  source 1..21: mol_type = other RNA
tttaaagaggaaacctcttca

SEQ ID NO: 5496 - RNA, 21 nt, synthetic construct
  misc_feature 1..21: note = Synthetic
  source 1..21: mol_type = other RNA
ttaaagaggaaacctcttcat

SEQ ID NO: 5497 - RNA, 21 nt, synthetic construct
  misc_feature 1..21: note = Synthetic
  source 1..21: mol_type = other RNA
taaagaggaaacctcttcatt

SEQ ID NO: 5498 - RNA, 21 nt, synthetic construct
  misc_feature 1..21: note = Synthetic
  source 1..21: mol_type = other RNA
aaagaggaaacctcttcattc

SEQ ID NO: 5499 - RNA, 21 nt, synthetic construct
  misc_feature 1..21: note = Synthetic
  source 1..21: mol_type = other RNA
aagaggaaacctcttcattca

SEQ ID NO: 5500 - RNA, 21 nt, synthetic construct
  misc_feature 1..21: note = Synthetic
  source 1..21: mol_type = other RNA
agaggaaacctcttcattcac

SEQ ID NO: 5501 - RNA, 21 nt, synthetic construct
  misc_feature 1..21: note = Synthetic
  source 1..21: mol_type = other RNA
gaggaaacctcttcattcaca

SEQ ID NO: 5502 - RNA, 21 nt, synthetic construct
  misc_feature 1..21: note = Synthetic
  source 1..21: mol_type = other RNA
aggaaacctcttcattcacag

SEQ ID NO: 5503 - RNA, 21 nt, synthetic construct
  misc_feature 1..21: note = Synthetic
  source 1..21: mol_type = other RNA
ggaaacctcttcattcacagc

SEQ ID NO: 5504 - RNA, 21 nt, synthetic construct
  misc_feature 1..21: note = Synthetic
  source 1..21: mol_type = other RNA
gaaacctcttcattcacagct

SEQ ID NO: 5505 - RNA, 21 nt, synthetic construct
  misc_feature 1..21: note = Synthetic
  source 1..21: mol_type = other RNA
aaacctcttcattcacagctt

SEQ ID NO: 5506 - RNA, 21 nt, synthetic construct
  misc_feature 1..21: note = Synthetic
  source 1..21: mol_type = other RNA
aacctcttcattcacagcttc

SEQ ID NO: 5507 - RNA, 21 nt, synthetic construct
  misc_feature 1..21: note = Synthetic
  source 1..21: mol_type = other RNA
acctcttcattcacagcttcg

SEQ ID NO: 5508 - RNA, 21 nt, synthetic construct
  misc_feature 1..21: note = Synthetic
  source 1..21: mol_type = other RNA
cctcttcattcacagcttcgt

SEQ ID NO: 5509 - RNA, 21 nt, synthetic construct
  misc_feature 1..21: note = Synthetic
  source 1..21: mol_type = other RNA
ctcttcattcacagcttcgtt

SEQ ID NO: 5510 - RNA, 21 nt, synthetic construct
  misc_feature 1..21: note = Synthetic
  source 1..21: mol_type = other RNA
tcttcattcacagcttcgttg

SEQ ID NO: 5511 - RNA, 21 nt, synthetic construct
  misc_feature 1..21: note = Synthetic
  source 1..21: mol_type = other RNA
cttcattcacagcttcgttga

SEQ ID NO: 5512 - RNA, 21 nt, synthetic construct
  misc_feature 1..21: note = Synthetic
  source 1..21: mol_type = other RNA
ttcattcacagcttcgttgag

SEQ ID NO: 5513 - RNA, 21 nt, synthetic construct
  misc_feature 1..21: note = Synthetic
  source 1..21: mol_type = other RNA
tcattcacagcttcgttgagg

SEQ ID NO: 5514 - RNA, 21 nt, synthetic construct
  misc_feature 1..21: note = Synthetic
  source 1..21: mol_type = other RNA
cattcacagcttcgttgaggg

SEQ ID NO: 5515 - RNA, 21 nt, synthetic construct
  misc_feature 1..21: note = Synthetic
  source 1..21: mol_type = other RNA
attcacagcttcgttgagggg

SEQ ID NO: 5516 - RNA, 21 nt, synthetic construct
  misc_feature 1..21: note = Synthetic
  source 1..21: mol_type = other RNA
ttcacagcttcgttgaggggt

SEQ ID NO: 5517 - RNA, 21 nt, synthetic construct
  misc_feature 1..21: note = Synthetic
  source 1..21: mol_type = other RNA
tcacagcttcgttgaggggtt

SEQ ID NO: 5518 - RNA, 21 nt, synthetic construct
  misc_feature 1..21: note = Synthetic
  source 1..21: mol_type = other RNA
cacagcttcgttgaggggttc

SEQ ID NO: 5519 - RNA, 21 nt, synthetic construct
  misc_feature 1..21: note = Synthetic
  source 1..21: mol_type = other RNA
acagcttcgttgaggggttcc

SEQ ID NO: 5520 - RNA, 21 nt, synthetic construct
  misc_feature 1..21: note = Synthetic
  source 1..21: mol_type = other RNA
cagcttcgttgaggggttcct

SEQ ID NO: 5521 - RNA, 21 nt, synthetic construct
  misc_feature 1..21: note = Synthetic
  source 1..21: mol_type = other RNA
agcttcgttgaggggttcctg

SEQ ID NO: 5522 - RNA, 21 nt, synthetic construct
  misc_feature 1..21: note = Synthetic
  source 1..21: mol_type = other RNA
gcttcgttgaggggttcctgg

SEQ ID NO: 5523 - RNA, 21 nt, synthetic construct
  misc_feature 1..21: note = Synthetic
  source 1..21: mol_type = other RNA
cttcgttgaggggttcctgga

SEQ ID NO: 5524 - RNA, 21 nt, synthetic construct
  misc_feature 1..21: note = Synthetic
  source 1..21: mol_type = other RNA
ttcgttgaggggttcctggag

SEQ ID NO: 5525 - RNA, 21 nt, synthetic construct
  misc_feature 1..21: note = Synthetic
  source 1..21: mol_type = other RNA
tcgttgaggggttcctggagg

SEQ ID NO: 5526 - RNA, 21 nt, synthetic construct
  misc_feature 1..21: note = Synthetic
  source 1..21: mol_type = other RNA
cgttgaggggttcctggagga

SEQ ID NO: 5527 - RNA, 21 nt, synthetic construct
  misc_feature 1..21: note = Synthetic
  source 1..21: mol_type = other RNA
gttgaggggttcctggaggac

SEQ ID NO: 5528 - RNA, 21 nt, synthetic construct
  misc_feature 1..21: note = Synthetic
  source 1..21: mol_type = other RNA
ttgaggggttcctggaggacg

SEQ ID NO: 5529 - RNA, 21 nt, synthetic construct
  misc_feature 1..21: note = Synthetic
  source 1..21: mol_type = other RNA
tgaggggttcctggaggacgt

SEQ ID NO: 5530 - RNA, 21 nt, synthetic construct
  misc_feature 1..21: note = Synthetic
  source 1..21: mol_type = other RNA
gaggggttcctggaggacgtc

SEQ ID NO: 5531 - RNA, 21 nt, synthetic construct
  misc_feature 1..21: note = Synthetic
  source 1..21: mol_type = other RNA
aggggttcctggaggacgtct

SEQ ID NO: 5532 - RNA, 21 nt, synthetic construct
  misc_feature 1..21: note = Synthetic
  source 1..21: mol_type = other RNA
ggggttcctggaggacgtctc

SEQ ID NO: 5533 - RNA, 21 nt, synthetic construct
  misc_feature 1..21: note = Synthetic
  source 1..21: mol_type = other RNA
gggttcctggaggacgtctct

SEQ ID NO: 5534 - RNA, 21 nt, synthetic construct
  misc_feature 1..21: note = Synthetic
  source 1..21: mol_type = other RNA
ggttcctggaggacgtctctg

SEQ ID NO: 5535 - RNA, 21 nt, synthetic construct
  misc_feature 1..21: note = Synthetic
  source 1..21: mol_type = other RNA
gttcctggaggacgtctctgg

SEQ ID NO: 5536 - RNA, 21 nt, synthetic construct
  misc_feature 1..21: note = Synthetic
  source 1..21: mol_type = other RNA
ttcctggaggacgtctctgga

SEQ ID NO: 5537 - RNA, 21 nt, synthetic construct
  misc_feature 1..21: note = Synthetic
  source 1..21: mol_type = other RNA
tcctggaggacgtctctggat

SEQ ID NO: 5538 - RNA, 21 nt, synthetic construct
  misc_feature 1..21: note = Synthetic
  source 1..21: mol_type = other RNA
cctggaggacgtctctggatt

SEQ ID NO: 5539 - RNA, 21 nt, synthetic construct
  misc_feature 1..21: note = Synthetic
  source 1..21: mol_type = other RNA
ctggaggacgtctctggattc

SEQ ID NO: 5540 - RNA, 21 nt, synthetic construct
  misc_feature 1..21: note = Synthetic
  source 1..21: mol_type = other RNA
tggaggacgtctctggattca

SEQ ID NO: 5541 - RNA, 21 nt, synthetic construct
  misc_feature 1..21: note = Synthetic
  source 1..21: mol_type = other RNA
ggaggacgtctctggattcaa

SEQ ID NO: 5542 - RNA, 21 nt, synthetic construct
  misc_feature 1..21: note = Synthetic
  source 1..21: mol_type = other RNA
gaggacgtctctggattcaag

SEQ ID NO: 5543 - RNA, 21 nt, synthetic construct
  misc_feature 1..21: note = Synthetic
  source 1..21: mol_type = other RNA
aggacgtctctggattcaagt

SEQ ID NO: 5544 - RNA, 21 nt, synthetic construct
  misc_feature 1..21: note = Synthetic
  source 1..21: mol_type = other RNA
ggacgtctctggattcaagtc

SEQ ID NO: 5545 - RNA, 21 nt, synthetic construct
  misc_feature 1..21: note = Synthetic
  source 1..21: mol_type = other RNA
gacgtctctggattcaagtcc

SEQ ID NO: 5546 - RNA, 21 nt, synthetic construct
  misc_feature 1..21: note = Synthetic
  source 1..21: mol_type = other RNA
acgtctctggattcaagtccc

SEQ ID NO: 5547 - RNA, 21 nt, synthetic construct
  misc_feature 1..21: note = Synthetic
  source 1..21: mol_type = other RNA
cgtctctggattcaagtccca

SEQ ID NO: 5548 - RNA, 21 nt, synthetic construct
  misc_feature 1..21: note = Synthetic
  source 1..21: mol_type = other RNA
gtctctggattcaagtcccag

SEQ ID NO: 5549 - RNA, 21 nt, synthetic construct
  misc_feature 1..21: note = Synthetic
  source 1..21: mol_type = other RNA
tctctggattcaagtcccagg

SEQ ID NO: 5550 - RNA, 21 nt, synthetic construct
  misc_feature 1..21: note = Synthetic
  source 1..21: mol_type = other RNA
ctctggattcaagtcccaggg

SEQ ID NO: 5551 - RNA, 21 nt, synthetic construct
  misc_feature 1..21: note = Synthetic
  source 1..21: mol_type = other RNA
tctggattcaagtcccagggg

SEQ ID NO: 5552 - RNA, 21 nt, synthetic construct
  misc_feature 1..21: note = Synthetic
  source 1..21: mol_type = other RNA
ctggattcaagtcccaggggt

SEQ ID NO: 5553 - RNA, 21 nt, synthetic construct
  misc_feature 1..21: note = Synthetic
  source 1..21: mol_type = other RNA
tggattcaagtcccaggggtt

SEQ ID NO: 5554 - RNA, 21 nt, synthetic construct
  misc_feature 1..21: note = Synthetic
  source 1..21: mol_type = other RNA
ggattcaagtcccaggggttc

SEQ ID NO: 5555 - RNA, 21 nt, synthetic construct
  misc_feature 1..21: note = Synthetic
  source 1..21: mol_type = other RNA
gattcaagtcccaggggttct

SEQ ID NO: 5556 - RNA, 21 nt, synthetic construct
  misc_feature 1..21: note = Synthetic
  source 1..21: mol_type = other RNA
attcaagtcccaggggttctg

SEQ ID NO: 5557 - RNA, 21 nt, synthetic construct
  misc_feature 1..21: note = Synthetic
  source 1..21: mol_type = other RNA
ttcaagtcccaggggttctgg

SEQ ID NO: 5558 - RNA, 21 nt, synthetic construct
  misc_feature 1..21: note = Synthetic
  source 1..21: mol_type = other RNA
tcaagtcccaggggttctggt

SEQ ID NO: 5559 - RNA, 21 nt, synthetic construct
  misc_feature 1..21: note = Synthetic
  source 1..21: mol_type = other RNA
caagtcccaggggttctggtt

SEQ ID NO: 5560 - RNA, 21 nt, synthetic construct
  misc_feature 1..21: note = Synthetic
  source 1..21: mol_type = other RNA
aagtcccaggggttctggttg

SEQ ID NO: 5561 - RNA, 21 nt, synthetic construct
  misc_feature 1..21: note = Synthetic
  source 1..21: mol_type = other RNA
agtcccaggggttctggttgg

SEQ ID NO: 5562 - RNA, 21 nt, synthetic construct
  misc_feature 1..21: note = Synthetic
  source 1..21: mol_type = other RNA
gtcccaggggttctggttggg

SEQ ID NO: 5563 - RNA, 21 nt, synthetic construct
  misc_feature 1..21: note = Synthetic
  source 1..21: mol_type = other RNA
tcccaggggttctggttggga

SEQ ID NO: 5564 - RNA, 21 nt, synthetic construct
  misc_feature 1..21: note = Synthetic
  source 1..21: mol_type = other RNA
cccaggggttctggttgggac

SEQ ID NO: 5565 - RNA, 21 nt, synthetic construct
  misc_feature 1..21: note = Synthetic
  source 1..21: mol_type = other RNA
ccaggggttctggttgggact

SEQ ID NO: 5566 - RNA, 21 nt, synthetic construct
  misc_feature 1..21: note = Synthetic
  source 1..21: mol_type = other RNA
caggggttctggttgggactg

SEQ ID NO: 5567 - RNA, 21 nt, synthetic construct
  misc_feature 1..21: note = Synthetic
  source 1..21: mol_type = other RNA
aggggttctggttgggactgt

SEQ ID NO: 5568 - RNA, 21 nt, synthetic construct
  misc_feature 1..21: note = Synthetic
  source 1..21: mol_type = other RNA
ggggttctggttgggactgtc

SEQ ID NO: 5569 - RNA, 21 nt, synthetic construct
  misc_feature 1..21: note = Synthetic
  source 1..21: mol_type = other RNA
gggttctggttgggactgtca

SEQ ID NO: 5570 - RNA, 21 nt, synthetic construct
  misc_feature 1..21: note = Synthetic
  source 1..21: mol_type = other RNA
ggttctggttgggactgtcag

SEQ ID NO: 5571 - RNA, 21 nt, synthetic construct
  misc_feature 1..21: note = Synthetic
  source 1..21: mol_type = other RNA
gttctggttgggactgtcagg

SEQ ID NO: 5572 - RNA, 21 nt, synthetic construct
  misc_feature 1..21: note = Synthetic
  source 1..21: mol_type = other RNA
ttctggttgggactgtcaggg

SEQ ID NO: 5573 - RNA, 21 nt, synthetic construct
  misc_feature 1..21: note = Synthetic
  source 1..21: mol_type = other RNA
tctggttgggactgtcagggc

SEQ ID NO: 5574 - RNA, 21 nt, synthetic construct
  misc_feature 1..21: note = Synthetic
  source 1..21: mol_type = other RNA
ctggttgggactgtcagggcg

SEQ ID NO: 5575 - RNA, 21 nt, synthetic construct
  misc_feature 1..21: note = Synthetic
  source 1..21: mol_type = other RNA
tggttgggactgtcagggcga

SEQ ID NO: 5576 - RNA, 21 nt, synthetic construct
  misc_feature 1..21: note = Synthetic
  source 1..21: mol_type = other RNA
ggttgggactgtcagggcgaa

SEQ ID NO: 5577 - RNA, 21 nt, synthetic construct
  misc_feature 1..21: note = Synthetic
  source 1..21: mol_type = other RNA
gttgggactgtcagggcgaaa

SEQ ID NO: 5578 - RNA, 21 nt, synthetic construct
  misc_feature 1..21: note = Synthetic
  source 1..21: mol_type = other RNA
ttgggactgtcagggcgaaat

SEQ ID NO: 5579 - RNA, 21 nt, synthetic construct
  misc_feature 1..21: note = Synthetic
  source 1..21: mol_type = other RNA
tgggactgtcagggcgaaatg

SEQ ID NO: 5580 - RNA, 21 nt, synthetic construct
  misc_feature 1..21: note = Synthetic
  source 1..21: mol_type = other RNA
gggactgtcagggcgaaatga

SEQ ID NO: 5581 - RNA, 21 nt, synthetic construct
  misc_feature 1..21: note = Synthetic
  source 1..21: mol_type = other RNA
ggactgtcagggcgaaatgac

SEQ ID NO: 5582 - RNA, 21 nt, synthetic construct
  misc_feature 1..21: note = Synthetic
  source 1..21: mol_type = other RNA
gactgtcagggcgaaatgacc

SEQ ID NO: 5583 - RNA, 21 nt, synthetic construct
  misc_feature 1..21: note = Synthetic
  source 1..21: mol_type = other RNA
actgtcagggcgaaatgacca

SEQ ID NO: 5584 - RNA, 21 nt, synthetic construct
  misc_feature 1..21: note = Synthetic
  source 1..21: mol_type = other RNA
ctgtcagggcgaaatgaccag

SEQ ID NO: 5585 - RNA, 21 nt, synthetic construct
  misc_feature 1..21: note = Synthetic
  source 1..21: mol_type = other RNA
tgtcagggcgaaatgaccagc

SEQ ID NO: 5586 - RNA, 21 nt, synthetic construct
  misc_feature 1..21: note = Synthetic
  source 1..21: mol_type = other RNA
gtcagggcgaaatgaccagca

SEQ ID NO: 5587 - RNA, 21 nt, synthetic construct
  misc_feature 1..21: note = Synthetic
  source 1..21: mol_type = other RNA
tcagggcgaaatgaccagcag

SEQ ID NO: 5588 - RNA, 21 nt, synthetic construct
  misc_feature 1..21: note = Synthetic
  source 1..21: mol_type = other RNA
cagggcgaaatgaccagcaga

SEQ ID NO: 5589 - RNA, 21 nt, synthetic construct
  misc_feature 1..21: note = Synthetic
  source 1..21: mol_type = other RNA
agggcgaaatgaccagcagat

SEQ ID NO: 5590 - RNA, 21 nt, synthetic construct
  misc_feature 1..21: note = Synthetic
  source 1..21: mol_type = other RNA
gggcgaaatgaccagcagatg

SEQ ID NO: 5591 - RNA, 21 nt, synthetic construct
  misc_feature 1..21: note = Synthetic
  source 1..21: mol_type = other RNA
ggcgaaatgaccagcagatgc

SEQ ID NO: 5592 - RNA, 21 nt, synthetic construct
  misc_feature 1..21: note = Synthetic
  source 1..21: mol_type = other RNA
gcgaaatgaccagcagatgct

SEQ ID NO: 5593 - RNA, 21 nt, synthetic construct
  misc_feature 1..21: note = Synthetic
  source 1..21: mol_type = other RNA
cgaaatgaccagcagatgctg

SEQ ID NO: 5594 - RNA, 21 nt, synthetic construct
  misc_feature 1..21: note = Synthetic
  source 1..21: mol_type = other RNA
gaaatgaccagcagatgctgg

SEQ ID NO: 5595 - RNA, 21 nt, synthetic construct
  misc_feature 1..21: note = Synthetic
  source 1..21: mol_type = other RNA
aaatgaccagcagatgctggg

SEQ ID NO: 5596 - RNA, 21 nt, synthetic construct
  misc_feature 1..21: note = Synthetic
  source 1..21: mol_type = other RNA
aatgaccagcagatgctggga

SEQ ID NO: 5597 - RNA, 21 nt, synthetic construct
  misc_feature 1..21: note = Synthetic
  source 1..21: mol_type = other RNA
atgaccagcagatgctgggac

SEQ ID NO: 5598 - RNA, 21 nt, synthetic construct
  misc_feature 1..21: note = Synthetic
  source 1..21: mol_type = other RNA
tgaccagcagatgctgggaca

SEQ ID NO: 5599 - RNA, 21 nt, synthetic construct
  misc_feature 1..21: note = Synthetic
  source 1..21: mol_type = other RNA
gaccagcagatgctgggacag

SEQ ID NO: 5600 - RNA, 21 nt, synthetic construct
  misc_feature 1..21: note = Synthetic
  source 1..21: mol_type = other RNA
accagcagatgctgggacagc

SEQ ID NO: 5601 - RNA, 21 nt, synthetic construct
  misc_feature 1..21: note = Synthetic
  source 1..21: mol_type = other RNA
ccagcagatgctgggacagca

SEQ ID NO: 5602 - RNA, 21 nt, synthetic construct
  misc_feature 1..21: note = Synthetic
  source 1..21: mol_type = other RNA
cagcagatgctgggacagcag

SEQ ID NO: 5603 - RNA, 21 nt, synthetic construct
  misc_feature 1..21: note = Synthetic
  source 1..21: mol_type = other RNA
agcagatgctgggacagcagc

SEQ ID NO: 5604 - RNA, 21 nt, synthetic construct
  misc_feature 1..21: note = Synthetic
  source 1..21: mol_type = other RNA
gcagatgctgggacagcagct

SEQ ID NO: 5605 - RNA, 21 nt, synthetic construct
  misc_feature 1..21: note = Synthetic
  source 1..21: mol_type = other RNA
cagatgctgggacagcagctg

SEQ ID NO: 5606 - RNA, 21 nt, synthetic construct
  misc_feature 1..21: note = Synthetic
  source 1..21: mol_type = other RNA
agatgctgggacagcagctgc

SEQ ID NO: 5607 - RNA, 21 nt, synthetic construct
  misc_feature 1..21: note = Synthetic
  source 1..21: mol_type = other RNA
gatgctgggacagcagctgcc

SEQ ID NO: 5608 - RNA, 21 nt, synthetic construct
  misc_feature 1..21: note = Synthetic
  source 1..21: mol_type = other RNA
atgctgggacagcagctgccc

SEQ ID NO: 5609 - RNA, 21 nt, synthetic construct
  misc_feature 1..21: note = Synthetic
  source 1..21: mol_type = other RNA
tgctgggacagcagctgcccg

SEQ ID NO: 5610 - RNA, 21 nt, synthetic construct
  misc_feature 1..21: note = Synthetic
  source 1..21: mol_type = other RNA
gctgggacagcagctgcccgc

SEQ ID NO: 5611 - RNA, 21 nt, synthetic construct
  misc_feature 1..21: note = Synthetic
  source 1..21: mol_type = other RNA
ctgggacagcagctgcccgca

SEQ ID NO: 5612 - RNA, 21 nt, synthetic construct
  misc_feature 1..21: note = Synthetic
  source 1..21: mol_type = other RNA
tgggacagcagctgcccgcag

SEQ ID NO: 5613 - RNA, 21 nt, synthetic construct
  misc_feature 1..21: note = Synthetic
  source 1..21: mol_type = other RNA
gggacagcagctgcccgcaga

SEQ ID NO: 5614 - RNA, 21 nt, synthetic construct
  misc_feature 1..21: note = Synthetic
  source 1..21: mol_type = other RNA
ggacagcagctgcccgcagac

SEQ ID NO: 5615 - RNA, 21 nt, synthetic construct
  misc_feature 1..21: note = Synthetic
  source 1..21: mol_type = other RNA
gacagcagctgcccgcagact

SEQ ID NO: 5616 - RNA, 21 nt, synthetic construct
  misc_feature 1..21: note = Synthetic
  source 1..21: mol_type = other RNA
acagcagctgcccgcagactc

SEQ ID NO: 5617 - RNA, 21 nt, synthetic construct
  misc_feature 1..21: note = Synthetic
  source 1..21: mol_type = other RNA
cagcagctgcccgcagactcg

SEQ ID NO: 5618 - RNA, 21 nt, synthetic construct
  misc_feature 1..21: note = Synthetic
  source 1..21: mol_type = other RNA
agcagctgcccgcagactcgg

SEQ ID NO: 5619 - RNA, 21 nt, synthetic construct
  misc_feature 1..21: note = Synthetic
  source 1..21: mol_type = other RNA
gcagctgcccgcagactcggg

SEQ ID NO: 5620 - RNA, 21 nt, synthetic construct
  misc_feature 1..21: note = Synthetic
  source 1..21: mol_type = other RNA
cagctgcccgcagactcggga

SEQ ID NO: 5621 - RNA, 21 nt, synthetic construct
  misc_feature 1..21: note = Synthetic
  source 1..21: mol_type = other RNA
agctgcccgcagactcgggag

SEQ ID NO: 5622 - RNA, 21 nt, synthetic construct
  misc_feature 1..21: note = Synthetic
  source 1..21: mol_type = other RNA
gctgcccgcagactcgggagg

SEQ ID NO: 5623 - RNA, 21 nt, synthetic construct
  misc_feature 1..21: note = Synthetic
  source 1..21: mol_type = other RNA
ctgcccgcagactcgggaggt

SEQ ID NO: 5624 - RNA, 21 nt, synthetic construct
  misc_feature 1..21: note = Synthetic
  source 1..21: mol_type = other RNA
tgcccgcagactcgggaggta

SEQ ID NO: 5625 - RNA, 21 nt, synthetic construct
  misc_feature 1..21: note = Synthetic
  source 1..21: mol_type = other RNA
gcccgcagactcgggaggtag

SEQ ID NO: 5626 - RNA, 21 nt, synthetic construct
  misc_feature 1..21: note = Synthetic
  source 1..21: mol_type = other RNA
cccgcagactcgggaggtagg

SEQ ID NO: 5627 - RNA, 21 nt, synthetic construct
  misc_feature 1..21: note = Synthetic
  source 1..21: mol_type = other RNA
ccgcagactcgggaggtagga

SEQ ID NO: 5628 - RNA, 21 nt, synthetic construct
  misc_feature 1..21: note = Synthetic
  source 1..21: mol_type = other RNA
cgcagactcgggaggtaggag

SEQ ID NO: 5629 - RNA, 21 nt, synthetic construct
  misc_feature 1..21: note = Synthetic
  source 1..21: mol_type = other RNA
gcagactcgggaggtaggagg

SEQ ID NO: 5630 - RNA, 21 nt, synthetic construct
  misc_feature 1..21: note = Synthetic
  source 1..21: mol_type = other RNA
cagactcgggaggtaggagga

SEQ ID NO: 5631 - RNA, 21 nt, synthetic construct
  misc_feature 1..21: note = Synthetic
  source 1..21: mol_type = other RNA
agactcgggaggtaggaggac

SEQ ID NO: 5632 - RNA, 21 nt, synthetic construct
  misc_feature 1..21: note = Synthetic
  source 1..21: mol_type = other RNA
gactcgggaggtaggaggact

SEQ ID NO: 5633 - RNA, 21 nt, synthetic construct
  misc_feature 1..21: note = Synthetic
  source 1..21: mol_type = other RNA
actcgggaggtaggaggactg

SEQ ID NO: 5634 - RNA, 21 nt, synthetic construct
  misc_feature 1..21: note = Synthetic
  source 1..21: mol_type = other RNA
ctcgggaggtaggaggactgg

SEQ ID NO: 5635 - RNA, 21 nt, synthetic construct
  misc_feature 1..21: note = Synthetic
  source 1..21: mol_type = other RNA
tcgggaggtaggaggactggc

SEQ ID NO: 5636 - RNA, 21 nt, synthetic construct
  misc_feature 1..21: note = Synthetic
  source 1..21: mol_type = other RNA
cgggaggtaggaggactggcc

SEQ ID NO: 5637 - RNA, 21 nt, synthetic construct
  misc_feature 1..21: note = Synthetic
  source 1..21: mol_type = other RNA
gggaggtaggaggactggccg

SEQ ID NO: 5638 - RNA, 21 nt, synthetic construct
  misc_feature 1..21: note = Synthetic
  source 1..21: mol_type = other RNA
ggaggtaggaggactggccgg

SEQ ID NO: 5639 - RNA, 21 nt, synthetic construct
  misc_feature 1..21: note = Synthetic
  source 1..21: mol_type = other RNA
gaggtaggaggactggccggg

SEQ ID NO: 5640 - RNA, 21 nt, synthetic construct
  misc_feature 1..21: note = Synthetic
  source 1..21: mol_type = other RNA
aggtaggaggactggccgggc

SEQ ID NO: 5641 - RNA, 21 nt, synthetic construct
  misc_feature 1..21: note = Synthetic
  source 1..21: mol_type = other RNA
ggtaggaggactggccgggca

SEQ ID NO: 5642 - RNA, 21 nt, synthetic construct
  misc_feature 1..21: note = Synthetic
  source 1..21: mol_type = other RNA
gtaggaggactggccgggcag

SEQ ID NO: 5643 - RNA, 21 nt, synthetic construct
  misc_feature 1..21: note = Synthetic
  source 1..21: mol_type = other RNA
taggaggactggccgggcagt

SEQ ID NO: 5644 - RNA, 21 nt, synthetic construct
  misc_feature 1..21: note = Synthetic
  source 1..21: mol_type = other RNA
aggaggactggccgggcagtg

SEQ ID NO: 5645 - RNA, 21 nt, synthetic construct
  misc_feature 1..21: note = Synthetic
  source 1..21: mol_type = other RNA
ggaggactggccgggcagtgt

SEQ ID NO: 5646 - RNA, 21 nt, synthetic construct
  misc_feature 1..21: note = Synthetic
  source 1..21: mol_type = other RNA
gaggactggccgggcagtgtg

SEQ ID NO: 5647 - RNA, 21 nt, synthetic construct
  misc_feature 1..21: note = Synthetic
  source 1..21: mol_type = other RNA
aggactggccgggcagtgtgc

SEQ ID NO: 5648 - RNA, 21 nt, synthetic construct
  misc_feature 1..21: note = Synthetic
  source 1..21: mol_type = other RNA
ggactggccgggcagtgtgct

SEQ ID NO: 5649 - RNA, 21 nt, synthetic construct
  misc_feature 1..21: note = Synthetic
  source 1..21: mol_type = other RNA
gactggccgggcagtgtgctg

SEQ ID NO: 5650 - RNA, 21 nt, synthetic construct
  misc_feature 1..21: note = Synthetic
  source 1..21: mol_type = other RNA
actggccgggcagtgtgctgg

SEQ ID NO: 5651 - RNA, 21 nt, synthetic construct
  misc_feature 1..21: note = Synthetic
  source 1..21: mol_type = other RNA
ctggccgggcagtgtgctggg

SEQ ID NO: 5652 - RNA, 21 nt, synthetic construct
  misc_feature 1..21: note = Synthetic
  source 1..21: mol_type = other RNA
tggccgggcagtgtgctgggc

SEQ ID NO: 5653 - RNA, 21 nt, synthetic construct
  misc_feature 1..21: note = Synthetic
  source 1..21: mol_type = other RNA
ggccgggcagtgtgctgggcc

SEQ ID NO: 5654 - RNA, 21 nt, synthetic construct
  misc_feature 1..21: note = Synthetic
  source 1..21: mol_type = other RNA
gccgggcagtgtgctgggccc

SEQ ID NO: 5655 - RNA, 21 nt, synthetic construct
  misc_feature 1..21: note = Synthetic
  source 1..21: mol_type = other RNA
ccgggcagtgtgctgggccct

SEQ ID NO: 5656 - RNA, 21 nt, synthetic construct
  misc_feature 1..21: note = Synthetic
  source 1..21: mol_type = other RNA
cgggcagtgtgctgggccctg

SEQ ID NO: 5657 - RNA, 21 nt, synthetic construct
  misc_feature 1..21: note = Synthetic
  source 1..21: mol_type = other RNA
gggcagtgtgctgggccctgc

SEQ ID NO: 5658 - RNA, 21 nt, synthetic construct
  misc_feature 1..21: note = Synthetic
  source 1..21: mol_type = other RNA
ggcagtgtgctgggccctgcc

SEQ ID NO: 5659 - RNA, 21 nt, synthetic construct
  misc_feature 1..21: note = Synthetic
  source 1..21: mol_type = other RNA
gcagtgtgctgggccctgccc

SEQ ID NO: 5660 - RNA, 21 nt, synthetic construct
  misc_feature 1..21: note = Synthetic
  source 1..21: mol_type = other RNA
cagtgtgctgggccctgccct

SEQ ID NO: 5661 - RNA, 21 nt, synthetic construct
  misc_feature 1..21: note = Synthetic
  source 1..21: mol_type = other RNA
agtgtgctgggccctgccctg

SEQ ID NO: 5662 - RNA, 21 nt, synthetic construct
  misc_feature 1..21: note = Synthetic
  source 1..21: mol_type = other RNA
gtgtgctgggccctgccctga

SEQ ID NO: 5663 - RNA, 21 nt, synthetic construct
  misc_feature 1..21: note = Synthetic
  source 1..21: mol_type = other RNA
tgtgctgggccctgccctgag

SEQ ID NO: 5664 - RNA, 21 nt, synthetic construct
  misc_feature 1..21: note = Synthetic
  source 1..21: mol_type = other RNA
gtgctgggccctgccctgagg

SEQ ID NO: 5665 - RNA, 21 nt, synthetic construct
  misc_feature 1..21: note = Synthetic
  source 1..21: mol_type = other RNA
tgctgggccctgccctgagga

SEQ ID NO: 5666 - RNA, 21 nt, synthetic construct
  misc_feature 1..21: note = Synthetic
  source 1..21: mol_type = other RNA
gctgggccctgccctgaggag

SEQ ID NO: 5667 - RNA, 21 nt, synthetic construct
  misc_feature 1..21: note = Synthetic
  source 1..21: mol_type = other RNA
ctgggccctgccctgaggaga

SEQ ID NO: 5668 - RNA, 21 nt, synthetic construct
  misc_feature 1..21: note = Synthetic
  source 1..21: mol_type = other RNA
tgggccctgccctgaggagac

SEQ ID NO: 5669 - RNA, 21 nt, synthetic construct
  misc_feature 1..21: note = Synthetic
  source 1..21: mol_type = other RNA
gggccctgccctgaggagaca

SEQ ID NO: 5670 - RNA, 21 nt, synthetic construct
  misc_feature 1..21: note = Synthetic
  source 1..21: mol_type = other RNA
ggccctgccctgaggagacag

SEQ ID NO: 5671 - RNA, 21 nt, synthetic construct
  misc_feature 1..21: note = Synthetic
  source 1..21: mol_type = other RNA
gccctgccctgaggagacaga

SEQ ID NO: 5672 - RNA, 21 nt, synthetic construct
  misc_feature 1..21: note = Synthetic
  source 1..21: mol_type = other RNA
ccctgccctgaggagacagac

SEQ ID NO: 5673 - RNA, 21 nt, synthetic construct
  misc_feature 1..21: note = Synthetic
  source 1..21: mol_type = other RNA
cctgccctgaggagacagacc

SEQ ID NO: 5674 - RNA, 21 nt, synthetic construct
  misc_feature 1..21: note = Synthetic
  source 1..21: mol_type = other RNA
ctgccctgaggagacagacca

SEQ ID NO: 5675 - RNA, 21 nt, synthetic construct
  misc_feature 1..21: note = Synthetic
  source 1..21: mol_type = other RNA
tgccctgaggagacagaccag

SEQ ID NO: 5676 - RNA, 21 nt, synthetic construct
  misc_feature 1..21: note = Synthetic
  source 1..21: mol_type = other RNA
gccctgaggagacagaccagg

SEQ ID NO: 5677 - RNA, 21 nt, synthetic construct
  misc_feature 1..21: note = Synthetic
  source 1..21: mol_type = other RNA
ccctgaggagacagaccaggt

SEQ ID NO: 5678 - RNA, 21 nt, synthetic construct
  misc_feature 1..21: note = Synthetic
  source 1..21: mol_type = other RNA
cctgaggagacagaccaggtg

SEQ ID NO: 5679 - RNA, 21 nt, synthetic construct
  misc_feature 1..21: note = Synthetic
  source 1..21: mol_type = other RNA
ctgaggagacagaccaggtgg

SEQ ID NO: 5680 - RNA, 21 nt, synthetic construct
  misc_feature 1..21: note = Synthetic
  source 1..21: mol_type = other RNA
tgaggagacagaccaggtggc

SEQ ID NO: 5681 - RNA, 21 nt, synthetic construct
  misc_feature 1..21: note = Synthetic
  source 1..21: mol_type = other RNA
gaggagacagaccaggtggct

SEQ ID NO: 5682 - RNA, 21 nt, synthetic construct
  misc_feature 1..21: note = Synthetic
  source 1..21: mol_type = other RNA
aggagacagaccaggtggcta

SEQ ID NO: 5683 - RNA, 21 nt, synthetic construct
  misc_feature 1..21: note = Synthetic
  source 1..21: mol_type = other RNA
ggagacagaccaggtggctac

SEQ ID NO: 5684 - RNA, 21 nt, synthetic construct
  misc_feature 1..21: note = Synthetic
  source 1..21: mol_type = other RNA
gagacagaccaggtggctaca

SEQ ID NO: 5685 - RNA, 21 nt, synthetic construct
  misc_feature 1..21: note = Synthetic
  source 1..21: mol_type = other RNA
agacagaccaggtggctacag

SEQ ID NO: 5686 - RNA, 21 nt, synthetic construct
  misc_feature 1..21: note = Synthetic
  source 1..21: mol_type = other RNA
gacagaccaggtggctacagg

SEQ ID NO: 5687 - RNA, 21 nt, synthetic construct
  misc_feature 1..21: note = Synthetic
  source 1..21: mol_type = other RNA
acagaccaggtggctacagga

SEQ ID NO: 5688 - RNA, 21 nt, synthetic construct
  misc_feature 1..21: note = Synthetic
  source 1..21: mol_type = other RNA
cagaccaggtggctacaggat

SEQ ID NO: 5689 - RNA, 21 nt, synthetic construct
  misc_feature 1..21: note = Synthetic
  source 1..21: mol_type = other RNA
agaccaggtggctacaggatc

SEQ ID NO: 5690 - RNA, 21 nt, synthetic construct
  misc_feature 1..21: note = Synthetic
  source 1..21: mol_type = other RNA
gaccaggtggctacaggatct

SEQ ID NO: 5691 - RNA, 21 nt, synthetic construct
  misc_feature 1..21: note = Synthetic
  source 1..21: mol_type = other RNA
accaggtggctacaggatctc

SEQ ID NO: 5692 - RNA, 21 nt, synthetic construct
  misc_feature 1..21: note = Synthetic
  source 1..21: mol_type = other RNA
ccaggtggctacaggatctcc

SEQ ID NO: 5693 - RNA, 21 nt, synthetic construct
  misc_feature 1..21: note = Synthetic
  source 1..21: mol_type = other RNA
caggtggctacaggatctcct

SEQ ID NO: 5694 - RNA, 21 nt, synthetic construct
  misc_feature 1..21: note = Synthetic
  source 1..21: mol_type = other RNA
aggtggctacaggatctcctc

SEQ ID NO: 5695 - RNA, 21 nt, synthetic construct
  misc_feature 1..21: note = Synthetic
  source 1..21: mol_type = other RNA
ggtggctacaggatctcctcc

SEQ ID NO: 5696 - RNA, 21 nt, synthetic construct
  misc_feature 1..21: note = Synthetic
  source 1..21: mol_type = other RNA
gtggctacaggatctcctccc

SEQ ID NO: 5697 - RNA, 21 nt, synthetic construct
  misc_feature 1..21: note = Synthetic
  source 1..21: mol_type = other RNA
tggctacaggatctcctcccg

SEQ ID NO: 5698 - RNA, 21 nt, synthetic construct
  misc_feature 1..21: note = Synthetic
  source 1..21: mol_type = other RNA
ggctacaggatctcctcccgc

SEQ ID NO: 5699 - RNA, 21 nt, synthetic construct
  misc_feature 1..21: note = Synthetic
  source 1..21: mol_type = other RNA
gctacaggatctcctcccgcg

SEQ ID NO: 5700 - RNA, 21 nt, synthetic construct
  misc_feature 1..21: note = Synthetic
  source 1..21: mol_type = other RNA
ctacaggatctcctcccgcgg

SEQ ID NO: 5701 - RNA, 21 nt, synthetic construct
  misc_feature 1..21: note = Synthetic
  source 1..21: mol_type = other RNA
tacaggatctcctcccgcggg

SEQ ID NO: 5702 - RNA, 21 nt, synthetic construct
  misc_feature 1..21: note = Synthetic
  source 1..21: mol_type = other RNA
acaggatctcctcccgcgggc

SEQ ID NO: 5703 - RNA, 21 nt, synthetic construct
  misc_feature 1..21: note = Synthetic
  source 1..21: mol_type = other RNA
caggatctcctcccgcgggct

SEQ ID NO: 5704 - RNA, 21 nt, synthetic construct
  misc_feature 1..21: note = Synthetic
  source 1..21: mol_type = other RNA
aggatctcctcccgcgggctc

SEQ ID NO: 5705 - RNA, 21 nt, synthetic construct
  misc_feature 1..21: note = Synthetic
  source 1..21: mol_type = other RNA
ggatctcctcccgcgggctcc

SEQ ID NO: 5706 - RNA, 21 nt, synthetic construct
  misc_feature 1..21: note = Synthetic
  source 1..21: mol_type = other RNA
gatctcctcccgcgggctcct

SEQ ID NO: 5707 - RNA, 21 nt, synthetic construct
  misc_feature 1..21: note = Synthetic
  source 1..21: mol_type = other RNA
atctcctcccgcgggctcctg

SEQ ID NO: 5708 - RNA, 21 nt, synthetic construct
  misc_feature 1..21: note = Synthetic
  source 1..21: mol_type = other RNA
tctcctcccgcgggctcctgg

SEQ ID NO: 5709 - RNA, 21 nt, synthetic construct
  misc_feature 1..21: note = Synthetic
  source 1..21: mol_type = other RNA
ctcctcccgcgggctcctggc

SEQ ID NO: 5710 - RNA, 21 nt, synthetic construct
  misc_feature 1..21: note = Synthetic
  source 1..21: mol_type = other RNA
tcctcccgcgggctcctggcc

SEQ ID NO: 5711 - RNA, 21 nt, synthetic construct
  misc_feature 1..21: note = Synthetic
  source 1..21: mol_type = other RNA
cctcccgcgggctcctggcct

SEQ ID NO: 5712 - RNA, 21 nt, synthetic construct
  misc_feature 1..21: note = Synthetic
  source 1..21: mol_type = other RNA
ctcccgcgggctcctggcctt

SEQ ID NO: 5713 - RNA, 21 nt, synthetic construct
  misc_feature 1..21: note = Synthetic
  source 1..21: mol_type = other RNA
tcccgcgggctcctggccttc

SEQ ID NO: 5714 - RNA, 21 nt, synthetic construct
  misc_feature 1..21: note = Synthetic
  source 1..21: mol_type = other RNA
cccgcgggctcctggccttca

SEQ ID NO: 5715 - RNA, 21 nt, synthetic construct
  misc_feature 1..21: note = Synthetic
  source 1..21: mol_type = other RNA
ccgcgggctcctggccttcag

SEQ ID NO: 5716 - RNA, 21 nt, synthetic construct
  misc_feature 1..21: note = Synthetic
  source 1..21: mol_type = other RNA
cgcgggctcctggccttcaga

SEQ ID NO: 5717 - RNA, 21 nt, synthetic construct
  misc_feature 1..21: note = Synthetic
  source 1..21: mol_type = other RNA
gcgggctcctggccttcagag

SEQ ID NO: 5718 - RNA, 21 nt, synthetic construct
  misc_feature 1..21: note = Synthetic
  source 1..21: mol_type = other RNA
cgggctcctggccttcagagg

SEQ ID NO: 5719 - RNA, 21 nt, synthetic construct
  misc_feature 1..21: note = Synthetic
  source 1..21: mol_type = other RNA
gggctcctggccttcagaggg

SEQ ID NO: 5720 - RNA, 21 nt, synthetic construct
  misc_feature 1..21: note = Synthetic
  source 1..21: mol_type = other RNA
ggctcctggccttcagagggg

SEQ ID NO: 5721 - RNA, 21 nt, synthetic construct
  misc_feature 1..21: note = Synthetic
  source 1..21: mol_type = other RNA
gctcctggccttcagaggggt

SEQ ID NO: 5722 - RNA, 21 nt, synthetic construct
  misc_feature 1..21: note = Synthetic
  source 1..21: mol_type = other RNA
ctcctggccttcagaggggtc

SEQ ID NO: 5723 - RNA, 21 nt, synthetic construct
  misc_feature 1..21: note = Synthetic
  source 1..21: mol_type = other RNA
tcctggccttcagaggggtct

SEQ ID NO: 5724 - RNA, 21 nt, synthetic construct
  misc_feature 1..21: note = Synthetic
  source 1..21: mol_type = other RNA
cctggccttcagaggggtctg

SEQ ID NO: 5725 - RNA, 21 nt, synthetic construct
  misc_feature 1..21: note = Synthetic
  source 1..21: mol_type = other RNA
ctggccttcagaggggtctgc

SEQ ID NO: 5726 - RNA, 21 nt, synthetic construct
  misc_feature 1..21: note = Synthetic
  source 1..21: mol_type = other RNA
tggccttcagaggggtctgcc

SEQ ID NO: 5727 - RNA, 21 nt, synthetic construct
  misc_feature 1..21: note = Synthetic
  source 1..21: mol_type = other RNA
ggccttcagaggggtctgccc

SEQ ID NO: 5728 - RNA, 21 nt, synthetic construct
  misc_feature 1..21: note = Synthetic
  source 1..21: mol_type = other RNA
gccttcagaggggtctgcccg

SEQ ID NO: 5729 - RNA, 21 nt, synthetic construct
  misc_feature 1..21: note = Synthetic
  source 1..21: mol_type = other RNA
ccttcagaggggtctgcccgt

SEQ ID NO: 5730 - RNA, 21 nt, synthetic construct
  misc_feature 1..21: note = Synthetic
  source 1..21: mol_type = other RNA
cttcagaggggtctgcccgtt

SEQ ID NO: 5731 - RNA, 21 nt, synthetic construct
  misc_feature 1..21: note = Synthetic
  source 1..21: mol_type = other RNA
ttcagaggggtctgcccgttg

SEQ ID NO: 5732 - RNA, 21 nt, synthetic construct
  misc_feature 1..21: note = Synthetic
  source 1..21: mol_type = other RNA
tcagaggggtctgcccgttgg

SEQ ID NO: 5733 - RNA, 21 nt, synthetic construct
  misc_feature 1..21: note = Synthetic
  source 1..21: mol_type = other RNA
cagaggggtctgcccgttggg

SEQ ID NO: 5734 - RNA, 21 nt, synthetic construct
  misc_feature 1..21: note = Synthetic
  source 1..21: mol_type = other RNA
agaggggtctgcccgttgggt

SEQ ID NO: 5735 - RNA, 21 nt, synthetic construct
  misc_feature 1..21: note = Synthetic
  source 1..21: mol_type = other RNA
gaggggtctgcccgttgggta

SEQ ID NO: 5736 - RNA, 21 nt, synthetic construct
  misc_feature 1..21: note = Synthetic
  source 1..21: mol_type = other RNA
aggggtctgcccgttgggtac

SEQ ID NO: 5737 - RNA, 21 nt, synthetic construct
  misc_feature 1..21: note = Synthetic
  source 1..21: mol_type = other RNA
ggggtctgcccgttgggtaca

SEQ ID NO: 5738 - RNA, 21 nt, synthetic construct
  misc_feature 1..21: note = Synthetic
  source 1..21: mol_type = other RNA
gggtctgcccgttgggtacag

SEQ ID NO: 5739 - RNA, 21 nt, synthetic construct
  misc_feature 1..21: note = Synthetic
  source 1..21: mol_type = other RNA
ggtctgcccgttgggtacaga

SEQ ID NO: 5740 - RNA, 21 nt, synthetic construct
  misc_feature 1..21: note = Synthetic
  source 1..21: mol_type = other RNA
gtctgcccgttgggtacagag

SEQ ID NO: 5741 - RNA, 21 nt, synthetic construct
  misc_feature 1..21: note = Synthetic
  source 1..21: mol_type = other RNA
tctgcccgttgggtacagagc

SEQ ID NO: 5742 - RNA, 21 nt, synthetic construct
  misc_feature 1..21: note = Synthetic
  source 1..21: mol_type = other RNA
ctgcccgttgggtacagagcc

SEQ ID NO: 5743 - RNA, 21 nt, synthetic construct
  misc_feature 1..21: note = Synthetic
  source 1..21: mol_type = other RNA
tgcccgttgggtacagagcca

SEQ ID NO: 5744 - RNA, 21 nt, synthetic construct
  misc_feature 1..21: note = Synthetic
  source 1..21: mol_type = other RNA
gcccgttgggtacagagccat

SEQ ID NO: 5745 - RNA, 21 nt, synthetic construct
  misc_feature 1..21: note = Synthetic
  source 1..21: mol_type = other RNA
cccgttgggtacagagccatt

SEQ ID NO: 5746 - RNA, 21 nt, synthetic construct
  misc_feature 1..21: note = Synthetic
  source 1..21: mol_type = other RNA
ccgttgggtacagagccattc

SEQ ID NO: 5747 - RNA, 21 nt, synthetic construct
  misc_feature 1..21: note = Synthetic
  source 1..21: mol_type = other RNA
cgttgggtacagagccattct

SEQ ID NO: 5748 - RNA, 21 nt, synthetic construct
  misc_feature 1..21: note = Synthetic
  source 1..21: mol_type = other RNA
gttgggtacagagccattctg

SEQ ID NO: 5749 - RNA, 21 nt, synthetic construct
  misc_feature 1..21: note = Synthetic
  source 1..21: mol_type = other RNA
ttgggtacagagccattctga

SEQ ID NO: 5750 - RNA, 21 nt, synthetic construct
  misc_feature 1..21: note = Synthetic
  source 1..21: mol_type = other RNA
tgggtacagagccattctgac

SEQ ID NO: 5751 - RNA, 21 nt, synthetic construct
  misc_feature 1..21: note = Synthetic
  source 1..21: mol_type = other RNA
gggtacagagccattctgacc

SEQ ID NO: 5752 - RNA, 21 nt, synthetic construct
  misc_feature 1..21: note = Synthetic
  source 1..21: mol_type = other RNA
ggtacagagccattctgacca

SEQ ID NO: 5753 - RNA, 21 nt, synthetic construct
  misc_feature 1..21: note = Synthetic
  source 1..21: mol_type = other RNA
gtacagagccattctgaccat

SEQ ID NO: 5754 - RNA, 21 nt, synthetic construct
  misc_feature 1..21: note = Synthetic
  source 1..21: mol_type = other RNA
tacagagccattctgaccatg

SEQ ID NO: 5755 - RNA, 21 nt, synthetic construct
  misc_feature 1..21: note = Synthetic
  source 1..21: mol_type = other RNA
acagagccattctgaccatgc

SEQ ID NO: 5756 - RNA, 21 nt, synthetic construct
  misc_feature 1..21: note = Synthetic
  source 1..21: mol_type = other RNA
cagagccattctgaccatgca

SEQ ID NO: 5757 - RNA, 21 nt, synthetic construct
  misc_feature 1..21: note = Synthetic
  source 1..21: mol_type = other RNA
agagccattctgaccatgcag

SEQ ID NO: 5758 - RNA, 21 nt, synthetic construct
  misc_feature 1..21: note = Synthetic
  source 1..21: mol_type = other RNA
gagccattctgaccatgcagg

SEQ ID NO: 5759 - RNA, 21 nt, synthetic construct
  misc_feature 1..21: note = Synthetic
  source 1..21: mol_type = other RNA
agccattctgaccatgcagga

SEQ ID NO: 5760 - RNA, 21 nt, synthetic construct
  misc_feature 1..21: note = Synthetic
  source 1..21: mol_type = other RNA
gccattctgaccatgcaggag

SEQ ID NO: 5761 - RNA, 21 nt, synthetic construct
  misc_feature 1..21: note = Synthetic
  source 1..21: mol_type = other RNA
ccattctgaccatgcaggagt

SEQ ID NO: 5762 - RNA, 21 nt, synthetic construct
  misc_feature 1..21: note = Synthetic
  source 1..21: mol_type = other RNA
cattctgaccatgcaggagtt

SEQ ID NO: 5763 - RNA, 21 nt, synthetic construct
  misc_feature 1..21: note = Synthetic
  source 1..21: mol_type = other RNA
attctgaccatgcaggagttt

SEQ ID NO: 5764 - RNA, 21 nt, synthetic construct
  misc_feature 1..21: note = Synthetic
  source 1..21: mol_type = other RNA
ttctgaccatgcaggagtttg

SEQ ID NO: 5765 - RNA, 21 nt, synthetic construct
  misc_feature 1..21: note = Synthetic
  source 1..21: mol_type = other RNA
tctgaccatgcaggagtttgc

SEQ ID NO: 5766 - RNA, 21 nt, synthetic construct
  misc_feature 1..21: note = Synthetic
  source 1..21: mol_type = other RNA
ctgaccatgcaggagtttgcc

SEQ ID NO: 5767 - RNA, 21 nt, synthetic construct
  misc_feature 1..21: note = Synthetic
  source 1..21: mol_type = other RNA
tgaccatgcaggagtttgccc

SEQ ID NO: 5768 - RNA, 21 nt, synthetic construct
  misc_feature 1..21: note = Synthetic
  source 1..21: mol_type = other RNA
gaccatgcaggagtttgccct

SEQ ID NO: 5769 - RNA, 21 nt, synthetic construct
  misc_feature 1..21: note = Synthetic
  source 1..21: mol_type = other RNA
accatgcaggagtttgccctt

SEQ ID NO: 5770 - RNA, 21 nt, synthetic construct
  misc_feature 1..21: note = Synthetic
  source 1..21: mol_type = other RNA
ccatgcaggagtttgcccttc

SEQ ID NO: 5771 - RNA, 21 nt, synthetic construct
  misc_feature 1..21: note = Synthetic
  source 1..21: mol_type = other RNA
catgcaggagtttgcccttct

SEQ ID NO: 5772 - RNA, 21 nt, synthetic construct
  misc_feature 1..21: note = Synthetic
  source 1..21: mol_type = other RNA
atgcaggagtttgcccttctc

SEQ ID NO: 5773 - RNA, 21 nt, synthetic construct
  misc_feature 1..21: note = Synthetic
  source 1..21: mol_type = other RNA
tgcaggagtttgcccttctct

SEQ ID NO: 5774 - RNA, 21 nt, synthetic construct
  misc_feature 1..21: note = Synthetic
  source 1..21: mol_type = other RNA
gcaggagtttgcccttctctc

SEQ ID NO: 5775 - RNA, 21 nt, synthetic construct
  misc_feature 1..21: note = Synthetic
  source 1..21: mol_type = other RNA
caggagtttgcccttctctcg

SEQ ID NO: 5776 - RNA, 21 nt, synthetic construct
  misc_feature 1..21: note = Synthetic
  source 1..21: mol_type = other RNA
aggagtttgcccttctctcgg

SEQ ID NO: 5777 - RNA, 21 nt, synthetic construct
  misc_feature 1..21: note = Synthetic
  source 1..21: mol_type = other RNA
ggagtttgcccttctctcggt

SEQ ID NO: 5778 - RNA, 21 nt, synthetic construct
  misc_feature 1..21: note = Synthetic
  source 1..21: mol_type = other RNA
gagtttgcccttctctcggtc

SEQ ID NO: 5779 - RNA, 21 nt, synthetic construct
  misc_feature 1..21: note = Synthetic
  source 1..21: mol_type = other RNA
agtttgcccttctctcggtct

SEQ ID NO: 5780 - RNA, 21 nt, synthetic construct
  misc_feature 1..21: note = Synthetic
  source 1..21: mol_type = other RNA
gtttgcccttctctcggtctg

SEQ ID NO: 5781 - RNA, 21 nt, synthetic construct
  misc_feature 1..21: note = Synthetic
  source 1..21: mol_type = other RNA
tttgcccttctctcggtctgg

SEQ ID NO: 5782 - RNA, 21 nt, synthetic construct
  misc_feature 1..21: note = Synthetic
  source 1..21: mol_type = other RNA
ttgcccttctctcggtctggc

SEQ ID NO: 5783 - RNA, 21 nt, synthetic construct
  misc_feature 1..21: note = Synthetic
  source 1..21: mol_type = other RNA
tgcccttctctcggtctggcc

SEQ ID NO: 5784 - RNA, 21 nt, synthetic construct
  misc_feature 1..21: note = Synthetic
  source 1..21: mol_type = other RNA
gcccttctctcggtctggcca

SEQ ID NO: 5785 - RNA, 21 nt, synthetic construct
  misc_feature 1..21: note = Synthetic
  source 1..21: mol_type = other RNA
cccttctctcggtctggccat

SEQ ID NO: 5786 - RNA, 21 nt, synthetic construct
  misc_feature 1..21: note = Synthetic
  source 1..21: mol_type = other RNA
ccttctctcggtctggccatg

SEQ ID NO: 5787 - RNA, 21 nt, synthetic construct
  misc_feature 1..21: note = Synthetic
  source 1..21: mol_type = other RNA
cttctctcggtctggccatgt

SEQ ID NO: 5788 - RNA, 21 nt, synthetic construct
  misc_feature 1..21: note = Synthetic
  source 1..21: mol_type = other RNA
ttctctcggtctggccatgta

SEQ ID NO: 5789 - RNA, 21 nt, synthetic construct
  misc_feature 1..21: note = Synthetic
  source 1..21: mol_type = other RNA
tctctcggtctggccatgtaa

SEQ ID NO: 5790 - RNA, 21 nt, synthetic construct
  misc_feature 1..21: note = Synthetic
  source 1..21: mol_type = other RNA
ctctcggtctggccatgtaaa

SEQ ID NO: 5791 - RNA, 21 nt, synthetic construct
  misc_feature 1..21: note = Synthetic
  source 1..21: mol_type = other RNA
tctcggtctggccatgtaaag

SEQ ID NO: 5792 - RNA, 21 nt, synthetic construct
  misc_feature 1..21: note = Synthetic
  source 1..21: mol_type = other RNA
ctcggtctggccatgtaaaga

SEQ ID NO: 5793 - RNA, 21 nt, synthetic construct
  misc_feature 1..21: note = Synthetic
  source 1..21: mol_type = other RNA
tcggtctggccatgtaaagat

SEQ ID NO: 5794 - RNA, 21 nt, synthetic construct
  misc_feature 1..21: note = Synthetic
  source 1..21: mol_type = other RNA
cggtctggccatgtaaagatg

SEQ ID NO: 5795 - RNA, 21 nt, synthetic construct
  misc_feature 1..21: note = Synthetic
  source 1..21: mol_type = other RNA
ggtctggccatgtaaagatgg

SEQ ID NO: 5796 - RNA, 21 nt, synthetic construct
  misc_feature 1..21: note = Synthetic
  source 1..21: mol_type = other RNA
gtctggccatgtaaagatggc

SEQ ID NO: 5797 - RNA, 21 nt, synthetic construct
  misc_feature 1..21: note = Synthetic
  source 1..21: mol_type = other RNA
tctggccatgtaaagatggca

SEQ ID NO: 5798 - RNA, 21 nt, synthetic construct
  misc_feature 1..21: note = Synthetic
  source 1..21: mol_type = other RNA
ctggccatgtaaagatggcat

SEQ ID NO: 5799 - RNA, 21 nt, synthetic construct
  misc_feature 1..21: note = Synthetic
  source 1..21: mol_type = other RNA
tggccatgtaaagatggcatc

SEQ ID NO: 5800 - RNA, 21 nt, synthetic construct
  misc_feature 1..21: note = Synthetic
  source 1..21: mol_type = other RNA
ggccatgtaaagatggcatca

SEQ ID NO: 5801 - RNA, 21 nt, synthetic construct
  misc_feature 1..21: note = Synthetic
  source 1..21: mol_type = other RNA
gccatgtaaagatggcatcat

SEQ ID NO: 5802 - RNA, 21 nt, synthetic construct
  misc_feature 1..21: note = Synthetic
  source 1..21: mol_type = other RNA
ccatgtaaagatggcatcatc

SEQ ID NO: 5803 - RNA, 21 nt, synthetic construct
  misc_feature 1..21: note = Synthetic
  source 1..21: mol_type = other RNA
catgtaaagatggcatcatcg

SEQ ID NO: 5804 - RNA, 21 nt, synthetic construct
  misc_feature 1..21: note = Synthetic
  source 1..21: mol_type = other RNA
atgtaaagatggcatcatcgc

SEQ ID NO: 5805 - RNA, 21 nt, synthetic construct
  misc_feature 1..21: note = Synthetic
  source 1..21: mol_type = other RNA
tgtaaagatggcatcatcgct

SEQ ID NO: 5806 - RNA, 21 nt, synthetic construct
  misc_feature 1..21: note = Synthetic
  source 1..21: mol_type = other RNA
gtaaagatggcatcatcgctg

SEQ ID NO: 5807 - RNA, 21 nt, synthetic construct
  misc_feature 1..21: note = Synthetic
  source 1..21: mol_type = other RNA
taaagatggcatcatcgctgt

SEQ ID NO: 5808 - RNA, 21 nt, synthetic construct
  misc_feature 1..21: note = Synthetic
  source 1..21: mol_type = other RNA
aaagatggcatcatcgctgtc

SEQ ID NO: 5809 - RNA, 21 nt, synthetic construct
  misc_feature 1..21: note = Synthetic
  source 1..21: mol_type = other RNA
aagatggcatcatcgctgtcc

SEQ ID NO: 5810 - RNA, 21 nt, synthetic construct
  misc_feature 1..21: note = Synthetic
  source 1..21: mol_type = other RNA
agatggcatcatcgctgtcca

SEQ ID NO: 5811 - RNA, 21 nt, synthetic construct
  misc_feature 1..21: note = Synthetic
  source 1..21: mol_type = other RNA
gatggcatcatcgctgtccag

SEQ ID NO: 5812 - RNA, 21 nt, synthetic construct
  misc_feature 1..21: note = Synthetic
  source 1..21: mol_type = other RNA
atggcatcatcgctgtccagc

SEQ ID NO: 5813 - RNA, 21 nt, synthetic construct
  misc_feature 1..21: note = Synthetic
  source 1..21: mol_type = other RNA
tggcatcatcgctgtccagct

SEQ ID NO: 5814 - RNA, 21 nt, synthetic construct
  misc_feature 1..21: note = Synthetic
  source 1..21: mol_type = other RNA
ggcatcatcgctgtccagctc

SEQ ID NO: 5815 - RNA, 21 nt, synthetic construct
  misc_feature 1..21: note = Synthetic
  source 1..21: mol_type = other RNA
gcatcatcgctgtccagctct

SEQ ID NO: 5816 - RNA, 21 nt, synthetic construct
  misc_feature 1..21: note = Synthetic
  source 1..21: mol_type = other RNA
catcatcgctgtccagctctg

SEQ ID NO: 5817 - RNA, 21 nt, synthetic construct
  misc_feature 1..21: note = Synthetic
  source 1..21: mol_type = other RNA
atcatcgctgtccagctctga

SEQ ID NO: 5818 - RNA, 21 nt, synthetic construct
  misc_feature 1..21: note = Synthetic
  source 1..21: mol_type = other RNA
tcatcgctgtccagctctgac

SEQ ID NO: 5819 - RNA, 21 nt, synthetic construct
  misc_feature 1..21: note = Synthetic
  source 1..21: mol_type = other RNA
catcgctgtccagctctgact

SEQ ID NO: 5820 - RNA, 21 nt, synthetic construct
  misc_feature 1..21: note = Synthetic
  source 1..21: mol_type = other RNA
atcgctgtccagctctgactc

SEQ ID NO: 5821 - RNA, 21 nt, synthetic construct
  misc_feature 1..21: note = Synthetic
  source 1..21: mol_type = other RNA
tcgctgtccagctctgactcg

SEQ ID NO: 5822 - RNA, 21 nt, synthetic construct
  misc_feature 1..21: note = Synthetic
  source 1..21: mol_type = other RNA
cgctgtccagctctgactcgg

SEQ ID NO: 5823 - RNA, 21 nt, synthetic construct
  misc_feature 1..21: note = Synthetic
  source 1..21: mol_type = other RNA
gctgtccagctctgactcgga

SEQ ID NO: 5824 - RNA, 21 nt, synthetic construct
  misc_feature 1..21: note = Synthetic
  source 1..21: mol_type = other RNA
ctgtccagctctgactcggag

SEQ ID NO: 5825 - RNA, 21 nt, synthetic construct
  misc_feature 1..21: note = Synthetic
  source 1..21: mol_type = other RNA
tgtccagctctgactcggagt

SEQ ID NO: 5826 - RNA, 21 nt, synthetic construct
  misc_feature 1..21: note = Synthetic
  source 1..21: mol_type = other RNA
gtccagctctgactcggagtg

SEQ ID NO: 5827 - RNA, 21 nt, synthetic construct
  misc_feature 1..21: note = Synthetic
  source 1..21: mol_type = other RNA
tccagctctgactcggagtgc

SEQ ID NO: 5828 - RNA, 21 nt, synthetic construct
  misc_feature 1..21: note = Synthetic
  source 1..21: mol_type = other RNA
ccagctctgactcggagtgca

SEQ ID NO: 5829 - RNA, 21 nt, synthetic construct
  misc_feature 1..21: note = Synthetic
  source 1..21: mol_type = other RNA
cagctctgactcggagtgcat

SEQ ID NO: 5830 - RNA, 21 nt, synthetic construct
  misc_feature 1..21: note = Synthetic
  source 1..21: mol_type = other RNA
agctctgactcggagtgcatc

SEQ ID NO: 5831 - RNA, 21 nt, synthetic construct
  misc_feature 1..21: note = Synthetic
  source 1..21: mol_type = other RNA
gctctgactcggagtgcatca

SEQ ID NO: 5832 - RNA, 21 nt, synthetic construct
  misc_feature 1..21: note = Synthetic
  source 1..21: mol_type = other RNA
ctctgactcggagtgcatcag

SEQ ID NO: 5833 - RNA, 21 nt, synthetic construct
  misc_feature 1..21: note = Synthetic
  source 1..21: mol_type = other RNA
tctgactcggagtgcatcagg

SEQ ID NO: 5834 - RNA, 21 nt, synthetic construct
  misc_feature 1..21: note = Synthetic
  source 1..21: mol_type = other RNA
ctgactcggagtgcatcaggc

SEQ ID NO: 5835 - RNA, 21 nt, synthetic construct
  misc_feature 1..21: note = Synthetic
  source 1..21: mol_type = other RNA
tgactcggagtgcatcaggct

SEQ ID NO: 5836 - RNA, 21 nt, synthetic construct
  misc_feature 1..21: note = Synthetic
  source 1..21: mol_type = other RNA
gactcggagtgcatcaggctg

SEQ ID NO: 5837 - RNA, 21 nt, synthetic construct
  misc_feature 1..21: note = Synthetic
  source 1..21: mol_type = other RNA
actcggagtgcatcaggctgc

SEQ ID NO: 5838 - RNA, 21 nt, synthetic construct
  misc_feature 1..21: note = Synthetic
  source 1..21: mol_type = other RNA
ctcggagtgcatcaggctgct

SEQ ID NO: 5839 - RNA, 21 nt, synthetic construct
  misc_feature 1..21: note = Synthetic
  source 1..21: mol_type = other RNA
tcggagtgcatcaggctgcta

SEQ ID NO: 5840 - RNA, 21 nt, synthetic construct
  misc_feature 1..21: note = Synthetic
  source 1..21: mol_type = other RNA
cggagtgcatcaggctgctac

SEQ ID NO: 5841 - RNA, 21 nt, synthetic construct
  misc_feature 1..21: note = Synthetic
  source 1..21: mol_type = other RNA
ggagtgcatcaggctgctact

SEQ ID NO: 5842 - RNA, 21 nt, synthetic construct
  misc_feature 1..21: note = Synthetic
  source 1..21: mol_type = other RNA
gagtgcatcaggctgctactt

SEQ ID NO: 5843 - RNA, 21 nt, synthetic construct
  misc_feature 1..21: note = Synthetic
  source 1..21: mol_type = other RNA
agtgcatcaggctgctactta

SEQ ID NO: 5844 - RNA, 21 nt, synthetic construct
  misc_feature 1..21: note = Synthetic
  source 1..21: mol_type = other RNA
gtgcatcaggctgctacttag

SEQ ID NO: 5845 - RNA, 21 nt, synthetic construct
  misc_feature 1..21: note = Synthetic
  source 1..21: mol_type = other RNA
tgcatcaggctgctacttagc

SEQ ID NO: 5846 - RNA, 21 nt, synthetic construct
  misc_feature 1..21: note = Synthetic
  source 1..21: mol_type = other RNA
gcatcaggctgctacttagca

SEQ ID NO: 5847 - RNA, 21 nt, synthetic construct
  misc_feature 1..21: note = Synthetic
  source 1..21: mol_type = other RNA
catcaggctgctacttagcaa

SEQ ID NO: 5848 - RNA, 21 nt, synthetic construct
  misc_feature 1..21: note = Synthetic
  source 1..21: mol_type = other RNA
atcaggctgctacttagcaaa

SEQ ID NO: 5849 - RNA, 21 nt, synthetic construct
  misc_feature 1..21: note = Synthetic
  source 1..21: mol_type = other RNA
tcaggctgctacttagcaaaa

SEQ ID NO: 5850 - RNA, 21 nt, synthetic construct
  misc_feature 1..21: note = Synthetic
  source 1..21: mol_type = other RNA
caggctgctacttagcaaaag

SEQ ID NO: 5851 - RNA, 21 nt, synthetic construct
  misc_feature 1..21: note = Synthetic
  source 1..21: mol_type = other RNA
aggctgctacttagcaaaagg

SEQ ID NO: 5852 - RNA, 21 nt, synthetic construct
  misc_feature 1..21: note = Synthetic
  source 1..21: mol_type = other RNA
ggctgctacttagcaaaaggc

SEQ ID NO: 5853 - RNA, 21 nt, synthetic construct
  misc_feature 1..21: note = Synthetic
  source 1..21: mol_type = other RNA
gctgctacttagcaaaaggcc

SEQ ID NO: 5854 - RNA, 21 nt, synthetic construct
  misc_feature 1..21: note = Synthetic
  source 1..21: mol_type = other RNA
ctgctacttagcaaaaggcct

SEQ ID NO: 5855 - RNA, 21 nt, synthetic construct
  misc_feature 1..21: note = Synthetic
  source 1..21: mol_type = other RNA
tgctacttagcaaaaggcctt

SEQ ID NO: 5856 - RNA, 21 nt, synthetic construct
  misc_feature 1..21: note = Synthetic
  source 1..21: mol_type = other RNA
gctacttagcaaaaggccttt

SEQ ID NO: 5857 - RNA, 21 nt, synthetic construct
  misc_feature 1..21: note = Synthetic
  source 1..21: mol_type = other RNA
ctacttagcaaaaggcctttc

SEQ ID NO: 5858 - RNA, 21 nt, synthetic construct
  misc_feature 1..21: note = Synthetic
  source 1..21: mol_type = other RNA
tacttagcaaaaggcctttct

SEQ ID NO: 5859 - RNA, 21 nt, synthetic construct
  misc_feature 1..21: note = Synthetic
  source 1..21: mol_type = other RNA
acttagcaaaaggcctttctg

SEQ ID NO: 5860 - RNA, 21 nt, synthetic construct
  misc_feature 1..21: note = Synthetic
  source 1..21: mol_type = other RNA
cttagcaaaaggcctttctgt

SEQ ID NO: 5861 - RNA, 21 nt, synthetic construct
  misc_feature 1..21: note = Synthetic
  source 1..21: mol_type = other RNA
ttagcaaaaggcctttctgtt

SEQ ID NO: 5862 - RNA, 21 nt, synthetic construct
  misc_feature 1..21: note = Synthetic
  source 1..21: mol_type = other RNA
tagcaaaaggcctttctgttt

SEQ ID NO: 5863 - RNA, 21 nt, synthetic construct
  misc_feature 1..21: note = Synthetic
  source 1..21: mol_type = other RNA
agcaaaaggcctttctgtttg

SEQ ID NO: 5864 - RNA, 21 nt, synthetic construct
  misc_feature 1..21: note = Synthetic
  source 1..21: mol_type = other RNA
gcaaaaggcctttctgtttga

SEQ ID NO: 5865 - RNA, 21 nt, synthetic construct
  misc_feature 1..21: note = Synthetic
  source 1..21: mol_type = other RNA
caaaaggcctttctgtttgat

SEQ ID NO: 5866 - RNA, 21 nt, synthetic construct
  misc_feature 1..21: note = Synthetic
  source 1..21: mol_type = other RNA
aaaaggcctttctgtttgatg

SEQ ID NO: 5867 - RNA, 21 nt, synthetic construct
  misc_feature 1..21: note = Synthetic
  source 1..21: mol_type = other RNA
aaaggcctttctgtttgatgc

SEQ ID NO: 5868 - RNA, 21 nt, synthetic construct
  misc_feature 1..21: note = Synthetic
  source 1..21: mol_type = other RNA
aaggcctttctgtttgatgcc

SEQ ID NO: 5869 - RNA, 21 nt, synthetic construct
  misc_feature 1..21: note = Synthetic
  source 1..21: mol_type = other RNA
aggcctttctgtttgatgcct

SEQ ID NO: 5870 - RNA, 21 nt, synthetic construct
  misc_feature 1..21: note = Synthetic
  source 1..21: mol_type = other RNA
ggcctttctgtttgatgcctg

SEQ ID NO: 5871 - RNA, 21 nt, synthetic construct
  misc_feature 1..21: note = Synthetic
  source 1..21: mol_type = other RNA
gcctttctgtttgatgcctgc

SEQ ID NO: 5872 - RNA, 21 nt, synthetic construct
  misc_feature 1..21: note = Synthetic
  source 1..21: mol_type = other RNA
cctttctgtttgatgcctgct

SEQ ID NO: 5873 - RNA, 21 nt, synthetic construct
  misc_feature 1..21: note = Synthetic
  source 1..21: mol_type = other RNA
ctttctgtttgatgcctgctc

SEQ ID NO: 5874 - RNA, 21 nt, synthetic construct
  misc_feature 1..21: note = Synthetic
  source 1..21: mol_type = other RNA
tttctgtttgatgcctgctcg

SEQ ID NO: 5875 - RNA, 21 nt, synthetic construct
  misc_feature 1..21: note = Synthetic
  source 1..21: mol_type = other RNA
ttctgtttgatgcctgctcgg

SEQ ID NO: 5876 - RNA, 21 nt, synthetic construct
  misc_feature 1..21: note = Synthetic
  source 1..21: mol_type = other RNA
tctgtttgatgcctgctcggg

SEQ ID NO: 5877 - RNA, 21 nt, synthetic construct
  misc_feature 1..21: note = Synthetic
  source 1..21: mol_type = other RNA
ctgtttgatgcctgctcggga

SEQ ID NO: 5878 - RNA, 21 nt, synthetic construct
  misc_feature 1..21: note = Synthetic
  source 1..21: mol_type = other RNA
tgtttgatgcctgctcgggag

SEQ ID NO: 5879 - RNA, 21 nt, synthetic construct
  misc_feature 1..21: note = Synthetic
  source 1..21: mol_type = other RNA
gtttgatgcctgctcgggagg

SEQ ID NO: 5880 - RNA, 21 nt, synthetic construct
  misc_feature 1..21: note = Synthetic
  source 1..21: mol_type = other RNA
tttgatgcctgctcgggaggt

SEQ ID NO: 5881 - RNA, 21 nt, synthetic construct
  misc_feature 1..21: note = Synthetic
  source 1..21: mol_type = other RNA
ttgatgcctgctcgggaggtt

SEQ ID NO: 5882 - RNA, 21 nt, synthetic construct
  misc_feature 1..21: note = Synthetic
  source 1..21: mol_type = other RNA
tgatgcctgctcgggaggttg

SEQ ID NO: 5883 - RNA, 21 nt, synthetic construct
  misc_feature 1..21: note = Synthetic
  source 1..21: mol_type = other RNA
gatgcctgctcgggaggttgg

SEQ ID NO: 5884 - RNA, 21 nt, synthetic construct
  misc_feature 1..21: note = Synthetic
  source 1..21: mol_type = other RNA
atgcctgctcgggaggttggc

SEQ ID NO: 5885 - RNA, 21 nt, synthetic construct
  misc_feature 1..21: note = Synthetic
  source 1..21: mol_type = other RNA
tgcctgctcgggaggttggct

SEQ ID NO: 5886 - RNA, 21 nt, synthetic construct
  misc_feature 1..21: note = Synthetic
  source 1..21: mol_type = other RNA
gcctgctcgggaggttggctt

SEQ ID NO: 5887 - RNA, 21 nt, synthetic construct
  misc_feature 1..21: note = Synthetic
  source 1..21: mol_type = other RNA
cctgctcgggaggttggcttc

SEQ ID NO: 5888 - RNA, 21 nt, synthetic construct
  misc_feature 1..21: note = Synthetic
  source 1..21: mol_type = other RNA
ctgctcgggaggttggcttca

SEQ ID NO: 5889 - RNA, 21 nt, synthetic construct
  misc_feature 1..21: note = Synthetic
  source 1..21: mol_type = other RNA
tgctcgggaggttggcttcag

SEQ ID NO: 5890 - RNA, 21 nt, synthetic construct
  misc_feature 1..21: note = Synthetic
  source 1..21: mol_type = other RNA
gctcgggaggttggcttcagc

SEQ ID NO: 5891 - RNA, 21 nt, synthetic construct
  misc_feature 1..21: note = Synthetic
  source 1..21: mol_type = other RNA
ctcgggaggttggcttcagct

SEQ ID NO: 5892 - RNA, 21 nt, synthetic construct
  misc_feature 1..21: note = Synthetic
  source 1..21: mol_type = other RNA
tcgggaggttggcttcagctc

SEQ ID NO: 5893 - RNA, 21 nt, synthetic construct
  misc_feature 1..21: note = Synthetic
  source 1..21: mol_type = other RNA
cgggaggttggcttcagctcc

SEQ ID NO: 5894 - RNA, 21 nt, synthetic construct
  misc_feature 1..21: note = Synthetic
  source 1..21: mol_type = other RNA
gggaggttggcttcagctcca

SEQ ID NO: 5895 - RNA, 21 nt, synthetic construct
  misc_feature 1..21: note = Synthetic
  source 1..21: mol_type = other RNA
ggaggttggcttcagctccag

SEQ ID NO: 5896 - RNA, 21 nt, synthetic construct
  misc_feature 1..21: note = Synthetic
  source 1..21: mol_type = other RNA
gaggttggcttcagctccagg

SEQ ID NO: 5897 - RNA, 21 nt, synthetic construct
  misc_feature 1..21: note = Synthetic
  source 1..21: mol_type = other RNA
aggttggcttcagctccaggc

SEQ ID NO: 5898 - RNA, 21 nt, synthetic construct
  misc_feature 1..21: note = Synthetic
  source 1..21: mol_type = other RNA
ggttggcttcagctccaggct

SEQ ID NO: 5899 - RNA, 21 nt, synthetic construct
  misc_feature 1..21: note = Synthetic
  source 1..21: mol_type = other RNA
gttggcttcagctccaggctt

SEQ ID NO: 5900 - RNA, 21 nt, synthetic construct
  misc_feature 1..21: note = Synthetic
  source 1..21: mol_type = other RNA
ttggcttcagctccaggcttt

SEQ ID NO: 5901 - RNA, 21 nt, synthetic construct
  misc_feature 1..21: note = Synthetic
  source 1..21: mol_type = other RNA
tggcttcagctccaggctttc

SEQ ID NO: 5902 - RNA, 21 nt, synthetic construct
  misc_feature 1..21: note = Synthetic
  source 1..21: mol_type = other RNA
ggcttcagctccaggctttcc

SEQ ID NO: 5903 - RNA, 21 nt, synthetic construct
  misc_feature 1..21: note = Synthetic
  source 1..21: mol_type = other RNA
gcttcagctccaggctttcct

SEQ ID NO: 5904 - RNA, 21 nt, synthetic construct
  misc_feature 1..21: note = Synthetic
  source 1..21: mol_type = other RNA
cttcagctccaggctttcctg

SEQ ID NO: 5905 - RNA, 21 nt, synthetic construct
  misc_feature 1..21: note = Synthetic
  source 1..21: mol_type = other RNA
ttcagctccaggctttcctga

SEQ ID NO: 5906 - RNA, 21 nt, synthetic construct
  misc_feature 1..21: note = Synthetic
  source 1..21: mol_type = other RNA
tcagctccaggctttcctgat

SEQ ID NO: 5907 - RNA, 21 nt, synthetic construct
  misc_feature 1..21: note = Synthetic
  source 1..21: mol_type = other RNA
cagctccaggctttcctgatc

SEQ ID NO: 5908 - RNA, 21 nt, synthetic construct
  misc_feature 1..21: note = Synthetic
  source 1..21: mol_type = other RNA
agctccaggctttcctgatcc

SEQ ID NO: 5909 - RNA, 21 nt, synthetic construct
  misc_feature 1..21: note = Synthetic
  source 1..21: mol_type = other RNA
gctccaggctttcctgatccg

SEQ ID NO: 5910 - RNA, 21 nt, synthetic construct
  misc_feature 1..21: note = Synthetic
  source 1..21: mol_type = other RNA
ctccaggctttcctgatccgt

SEQ ID NO: 5911 - RNA, 21 nt, synthetic construct
  misc_feature 1..21: note = Synthetic
  source 1..21: mol_type = other RNA
tccaggctttcctgatccgtg

SEQ ID NO: 5912 - RNA, 21 nt, synthetic construct
  misc_feature 1..21: note = Synthetic
  source 1..21: mol_type = other RNA
ccaggctttcctgatccgtgg

SEQ ID NO: 5913 - RNA, 21 nt, synthetic construct
  misc_feature 1..21: note = Synthetic
  source 1..21: mol_type = other RNA
caggctttcctgatccgtggc

SEQ ID NO: 5914 - RNA, 21 nt, synthetic construct
  misc_feature 1..21: note = Synthetic
  source 1..21: mol_type = other RNA
aggctttcctgatccgtggca

SEQ ID NO: 5915 - RNA, 21 nt, synthetic construct
  misc_feature 1..21: note = Synthetic
  source 1..21: mol_type = other RNA
ggctttcctgatccgtggcat

SEQ ID NO: 5916 - RNA, 21 nt, synthetic construct
  misc_feature 1..21: note = Synthetic
  source 1..21: mol_type = other RNA
gctttcctgatccgtggcatc

SEQ ID NO: 5917 - RNA, 21 nt, synthetic construct
  misc_feature 1..21: note = Synthetic
  source 1..21: mol_type = other RNA
ctttcctgatccgtggcatcc

SEQ ID NO: 5918 - RNA, 21 nt, synthetic construct
  misc_feature 1..21: note = Synthetic
  source 1..21: mol_type = other RNA
tttcctgatccgtggcatcca

SEQ ID NO: 5919 - RNA, 21 nt, synthetic construct
  misc_feature 1..21: note = Synthetic
  source 1..21: mol_type = other RNA
ttcctgatccgtggcatccag

SEQ ID NO: 5920 - RNA, 21 nt, synthetic construct
  misc_feature 1..21: note = Synthetic
  source 1..21: mol_type = other RNA
tcctgatccgtggcatccagg

SEQ ID NO: 5921 - RNA, 21 nt, synthetic construct
  misc_feature 1..21: note = Synthetic
  source 1..21: mol_type = other RNA
cctgatccgtggcatccagga

SEQ ID NO: 5922 - RNA, 21 nt, synthetic construct
  misc_feature 1..21: note = Synthetic
  source 1..21: mol_type = other RNA
ctgatccgtggcatccaggat

SEQ ID NO: 5923 - RNA, 21 nt, synthetic construct
  misc_feature 1..21: note = Synthetic
  source 1..21: mol_type = other RNA
tgatccgtggcatccaggatc

SEQ ID NO: 5924 - RNA, 21 nt, synthetic construct
  misc_feature 1..21: note = Synthetic
  source 1..21: mol_type = other RNA
gatccgtggcatccaggatct

SEQ ID NO: 5925 - RNA, 21 nt, synthetic construct
  misc_feature 1..21: note = Synthetic
  source 1..21: mol_type = other RNA
atccgtggcatccaggatctt

SEQ ID NO: 5926 - RNA, 21 nt, synthetic construct
  misc_feature 1..21: note = Synthetic
  source 1..21: mol_type = other RNA
tccgtggcatccaggatcttg

SEQ ID NO: 5927 - RNA, 21 nt, synthetic construct
  misc_feature 1..21: note = Synthetic
  source 1..21: mol_type = other RNA
ccgtggcatccaggatcttgt

SEQ ID NO: 5928 - RNA, 21 nt, synthetic construct
  misc_feature 1..21: note = Synthetic
  source 1..21: mol_type = other RNA
cgtggcatccaggatcttgta

SEQ ID NO: 5929 - RNA, 21 nt, synthetic construct
  misc_feature 1..21: note = Synthetic
  source 1..21: mol_type = other RNA
gtggcatccaggatcttgtac

SEQ ID NO: 5930 - RNA, 21 nt, synthetic construct
  misc_feature 1..21: note = Synthetic
  source 1..21: mol_type = other RNA
tggcatccaggatcttgtact

SEQ ID NO: 5931 - RNA, 21 nt, synthetic construct
  misc_feature 1..21: note = Synthetic
  source 1..21: mol_type = other RNA
ggcatccaggatcttgtactt

SEQ ID NO: 5932 - RNA, 21 nt, synthetic construct
  misc_feature 1..21: note = Synthetic
  source 1..21: mol_type = other RNA
gcatccaggatcttgtacttg

SEQ ID NO: 5933 - RNA, 21 nt, synthetic construct
  misc_feature 1..21: note = Synthetic
  source 1..21: mol_type = other RNA
catccaggatcttgtacttgc

SEQ ID NO: 5934 - RNA, 21 nt, synthetic construct
  misc_feature 1..21: note = Synthetic
  source 1..21: mol_type = other RNA
atccaggatcttgtacttgct

SEQ ID NO: 5935 - RNA, 21 nt, synthetic construct
  misc_feature 1..21: note = Synthetic
  source 1..21: mol_type = other RNA
tccaggatcttgtacttgctt

SEQ ID NO: 5936 - RNA, 21 nt, synthetic construct
  misc_feature 1..21: note = Synthetic
  source 1..21: mol_type = other RNA
ccaggatcttgtacttgcttt

SEQ ID NO: 5937 - RNA, 21 nt, synthetic construct
  misc_feature 1..21: note = Synthetic
  source 1..21: mol_type = other RNA
caggatcttgtacttgctttt

SEQ ID NO: 5938 - RNA, 21 nt, synthetic construct
  misc_feature 1..21: note = Synthetic
  source 1..21: mol_type = other RNA
aggatcttgtacttgcttttc

SEQ ID NO: 5939 - RNA, 21 nt, synthetic construct
  misc_feature 1..21: note = Synthetic
  source 1..21: mol_type = other RNA
ggatcttgtacttgcttttcc

SEQ ID NO: 5940 - RNA, 21 nt, synthetic construct
  misc_feature 1..21: note = Synthetic
  source 1..21: mol_type = other RNA
gatcttgtacttgcttttcct

SEQ ID NO: 5941 - RNA, 21 nt, synthetic construct
  misc_feature 1..21: note = Synthetic
  source 1..21: mol_type = other RNA
atcttgtacttgcttttcctc

SEQ ID NO: 5942 - RNA, 21 nt, synthetic construct
  misc_feature 1..21: note = Synthetic
  source 1..21: mol_type = other RNA
tcttgtacttgcttttcctct

SEQ ID NO: 5943 - RNA, 21 nt, synthetic construct
  misc_feature 1..21: note = Synthetic
  source 1..21: mol_type = other RNA
cttgtacttgcttttcctctt

SEQ ID NO: 5944 - RNA, 21 nt, synthetic construct
  misc_feature 1..21: note = Synthetic
  source 1..21: mol_type = other RNA
ttgtacttgcttttcctcttg

SEQ ID NO: 5945 - RNA, 21 nt, synthetic construct
  misc_feature 1..21: note = Synthetic
  source 1..21: mol_type = other RNA
tgtacttgcttttcctcttgg

SEQ ID NO: 5946 - RNA, 21 nt, synthetic construct
  misc_feature 1..21: note = Synthetic
  source 1..21: mol_type = other RNA
gtacttgcttttcctcttggg

SEQ ID NO: 5947 - RNA, 21 nt, synthetic construct
  misc_feature 1..21: note = Synthetic
  source 1..21: mol_type = other RNA
tacttgcttttcctcttgggt

SEQ ID NO: 5948 - RNA, 21 nt, synthetic construct
  misc_feature 1..21: note = Synthetic
  source 1..21: mol_type = other RNA
acttgcttttcctcttgggtt

SEQ ID NO: 5949 - RNA, 21 nt, synthetic construct
  misc_feature 1..21: note = Synthetic
  source 1..21: mol_type = other RNA
cttgcttttcctcttgggttt

SEQ ID NO: 5950 - RNA, 21 nt, synthetic construct
  misc_feature 1..21: note = Synthetic
  source 1..21: mol_type = other RNA
ttgcttttcctcttgggtttt

SEQ ID NO: 5951 - RNA, 21 nt, synthetic construct
  misc_feature 1..21: note = Synthetic
  source 1..21: mol_type = other RNA
tgcttttcctcttgggttttc

SEQ ID NO: 5952 - RNA, 21 nt, synthetic construct
  misc_feature 1..21: note = Synthetic
  source 1..21: mol_type = other RNA
gcttttcctcttgggttttcc

SEQ ID NO: 5953 - RNA, 21 nt, synthetic construct
  misc_feature 1..21: note = Synthetic
  source 1..21: mol_type = other RNA
cttttcctcttgggttttcct

SEQ ID NO: 5954 - RNA, 21 nt, synthetic construct
  misc_feature 1..21: note = Synthetic
  source 1..21: mol_type = other RNA
ttttcctcttgggttttcctt

SEQ ID NO: 5955 - RNA, 21 nt, synthetic construct
  misc_feature 1..21: note = Synthetic
  source 1..21: mol_type = other RNA
tttcctcttgggttttccttt

SEQ ID NO: 5956 - RNA, 21 nt, synthetic construct
  misc_feature 1..21: note = Synthetic
  source 1..21: mol_type = other RNA
ttcctcttgggttttcctttt

SEQ ID NO: 5957 - RNA, 21 nt, synthetic construct
  misc_feature 1..21: note = Synthetic
  source 1..21: mol_type = other RNA
tcctcttgggttttccttttt

SEQ ID NO: 5958 - RNA, 21 nt, synthetic construct
  misc_feature 1..21: note = Synthetic
  source 1..21: mol_type = other RNA
cctcttgggttttcctttttg

SEQ ID NO: 5959 - RNA, 21 nt, synthetic construct
  misc_feature 1..21: note = Synthetic
  source 1..21: mol_type = other RNA
ctcttgggttttcctttttgc

SEQ ID NO: 5960 - RNA, 21 nt, synthetic construct
  misc_feature 1..21: note = Synthetic
  source 1..21: mol_type = other RNA
tcttgggttttcctttttgcc

SEQ ID NO: 5961 - RNA, 21 nt, synthetic construct
  misc_feature 1..21: note = Synthetic
  source 1..21: mol_type = other RNA
cttgggttttcctttttgcct

SEQ ID NO: 5962 - RNA, 21 nt, synthetic construct
  misc_feature 1..21: note = Synthetic
  source 1..21: mol_type = other RNA
ttgggttttcctttttgcctc

SEQ ID NO: 5963 - RNA, 21 nt, synthetic construct
  misc_feature 1..21: note = Synthetic
  source 1..21: mol_type = other RNA
tgggttttcctttttgcctct

SEQ ID NO: 5964 - RNA, 21 nt, synthetic construct
  misc_feature 1..21: note = Synthetic
  source 1..21: mol_type = other RNA
gggttttcctttttgcctctt

SEQ ID NO: 5965 - RNA, 21 nt, synthetic construct
  misc_feature 1..21: note = Synthetic
  source 1..21: mol_type = other RNA
ggttttcctttttgcctctta

SEQ ID NO: 5966 - RNA, 21 nt, synthetic construct
  misc_feature 1..21: note = Synthetic
  source 1..21: mol_type = other RNA
gttttcctttttgcctcttac

SEQ ID NO: 5967 - RNA, 21 nt, synthetic construct
  misc_feature 1..21: note = Synthetic
  source 1..21: mol_type = other RNA
ttttcctttttgcctcttaca

SEQ ID NO: 5968 - RNA, 21 nt, synthetic construct
  misc_feature 1..21: note = Synthetic
  source 1..21: mol_type = other RNA
tttcctttttgcctcttacaa

SEQ ID NO: 5969 - RNA, 21 nt, synthetic construct
  misc_feature 1..21: note = Synthetic
  source 1..21: mol_type = other RNA
ttcctttttgcctcttacaac

SEQ ID NO: 5970 - RNA, 21 nt, synthetic construct
  misc_feature 1..21: note = Synthetic
  source 1..21: mol_type = other RNA
tcctttttgcctcttacaaca

SEQ ID NO: 5971 - RNA, 21 nt, synthetic construct
  misc_feature 1..21: note = Synthetic
  source 1..21: mol_type = other RNA
cctttttgcctcttacaacaa

SEQ ID NO: 5972 - RNA, 21 nt, synthetic construct
  misc_feature 1..21: note = Synthetic
  source 1..21: mol_type = other RNA
ctttttgcctcttacaacaac

SEQ ID NO: 5973 - RNA, 21 nt, synthetic construct
  misc_feature 1..21: note = Synthetic
  source 1..21: mol_type = other RNA
tttttgcctcttacaacaaca

SEQ ID NO: 5974 - RNA, 21 nt, synthetic construct
  misc_feature 1..21: note = Synthetic
  source 1..21: mol_type = other RNA
ttttgcctcttacaacaacag

SEQ ID NO: 5975 - RNA, 21 nt, synthetic construct
  misc_feature 1..21: note = Synthetic
  source 1..21: mol_type = other RNA
tttgcctcttacaacaacaga

SEQ ID NO: 5976 - RNA, 21 nt, synthetic construct
  misc_feature 1..21: note = Synthetic
  source 1..21: mol_type = other RNA
ttgcctcttacaacaacagat

SEQ ID NO: 5977 - RNA, 21 nt, synthetic construct
  misc_feature 1..21: note = Synthetic
  source 1..21: mol_type = other RNA
tgcctcttacaacaacagatc

SEQ ID NO: 5978 - RNA, 21 nt, synthetic construct
  misc_feature 1..21: note = Synthetic
  source 1..21: mol_type = other RNA
gcctcttacaacaacagatca

SEQ ID NO: 5979 - RNA, 21 nt, synthetic construct
  misc_feature 1..21: note = Synthetic
  source 1..21: mol_type = other RNA
cctcttacaacaacagatcac

SEQ ID NO: 5980 - RNA, 21 nt, synthetic construct
  misc_feature 1..21: note = Synthetic
  source 1..21: mol_type = other RNA
ctcttacaacaacagatcaca

SEQ ID NO: 5981 - RNA, 21 nt, synthetic construct
  misc_feature 1..21: note = Synthetic
  source 1..21: mol_type = other RNA
tcttacaacaacagatcacag

SEQ ID NO: 5982 - RNA, 21 nt, synthetic construct
  misc_feature 1..21: note = Synthetic
  source 1..21: mol_type = other RNA
cttacaacaacagatcacagt

SEQ ID NO: 5983 - RNA, 21 nt, synthetic construct
  misc_feature 1..21: note = Synthetic
  source 1..21: mol_type = other RNA
ttacaacaacagatcacagtc

SEQ ID NO: 5984 - RNA, 21 nt, synthetic construct
  misc_feature 1..21: note = Synthetic
  source 1..21: mol_type = other RNA
tacaacaacagatcacagtcc

SEQ ID NO: 5985 - RNA, 21 nt, synthetic construct
  misc_feature 1..21: note = Synthetic
  source 1..21: mol_type = other RNA
acaacaacagatcacagtcca

SEQ ID NO: 5986 - RNA, 21 nt, synthetic construct
  misc_feature 1..21: note = Synthetic
  source 1..21: mol_type = other RNA
caacaacagatcacagtccaa

SEQ ID NO: 5987 - RNA, 21 nt, synthetic construct
  misc_feature 1..21: note = Synthetic
  source 1..21: mol_type = other RNA
aacaacagatcacagtccaag

SEQ ID NO: 5988 - RNA, 21 nt, synthetic construct
  misc_feature 1..21: note = Synthetic
  source 1..21: mol_type = other RNA
acaacagatcacagtccaaga

SEQ ID NO: 5989 - RNA, 21 nt, synthetic construct
  misc_feature 1..21: note = Synthetic
  source 1..21: mol_type = other RNA
caacagatcacagtccaagac

SEQ ID NO: 5990 - RNA, 21 nt, synthetic construct
  misc_feature 1..21: note = Synthetic
  source 1..21: mol_type = other RNA
aacagatcacagtccaagaca

SEQ ID NO: 5991 - RNA, 21 nt, synthetic construct
  misc_feature 1..21: note = Synthetic
  source 1..21: mol_type = other RNA
acagatcacagtccaagacag

SEQ ID NO: 5992 - RNA, 21 nt, synthetic construct
  misc_feature 1..21: note = Synthetic
  source 1..21: mol_type = other RNA
cagatcacagtccaagacagg

SEQ ID NO: 5993 - RNA, 21 nt, synthetic construct
  misc_feature 1..21: note = Synthetic
  source 1..21: mol_type = other RNA
agatcacagtccaagacagga

SEQ ID NO: 5994 - RNA, 21 nt, synthetic construct
  misc_feature 1..21: note = Synthetic
  source 1..21: mol_type = other RNA
gatcacagtccaagacaggat

SEQ ID NO: 5995 - RNA, 21 nt, synthetic construct
  misc_feature 1..21: note = Synthetic
  source 1..21: mol_type = other RNA
atcacagtccaagacaggatt

SEQ ID NO: 5996 - RNA, 21 nt, synthetic construct
  misc_feature 1..21: note = Synthetic
  source 1..21: mol_type = other RNA
tcacagtccaagacaggattc

SEQ ID NO: 5997 - RNA, 21 nt, synthetic construct
  misc_feature 1..21: note = Synthetic
  source 1..21: mol_type = other RNA
cacagtccaagacaggattcc

SEQ ID NO: 5998 - RNA, 21 nt, synthetic construct
  misc_feature 1..21: note = Synthetic
  source 1..21: mol_type = other RNA
acagtccaagacaggattccc

SEQ ID NO: 5999 - RNA, 21 nt, synthetic construct
  misc_feature 1..21: note = Synthetic
  source 1..21: mol_type = other RNA
cagtccaagacaggattccca

SEQ ID NO: 6000 - RNA, 21 nt, synthetic construct
  misc_feature 1..21: note = Synthetic
  source 1..21: mol_type = other RNA
agtccaagacaggattcccaa

SEQ ID NO: 6001 - RNA, 21 nt, synthetic construct
  misc_feature 1..21: note = Synthetic
  source 1..21: mol_type = other RNA
gtccaagacaggattcccaag

SEQ ID NO: 6002 - RNA, 21 nt, synthetic construct
  misc_feature 1..21: note = Synthetic
  source 1..21: mol_type = other RNA
tccaagacaggattcccaagg

SEQ ID NO: 6003 - RNA, 21 nt, synthetic construct
  misc_feature 1..21: note = Synthetic
  source 1..21: mol_type = other RNA
ccaagacaggattcccaaggc

SEQ ID NO: 6004 - RNA, 21 nt, synthetic construct
  misc_feature 1..21: note = Synthetic
  source 1..21: mol_type = other RNA
caagacaggattcccaaggca

SEQ ID NO: 6005 - RNA, 21 nt, synthetic construct
  misc_feature 1..21: note = Synthetic
  source 1..21: mol_type = other RNA
aagacaggattcccaaggcaa

SEQ ID NO: 6006 - RNA, 21 nt, synthetic construct
  misc_feature 1..21: note = Synthetic
  source 1..21: mol_type = other RNA
agacaggattcccaaggcaac

SEQ ID NO: 6007 - RNA, 21 nt, synthetic construct
  misc_feature 1..21: note = Synthetic
  source 1..21: mol_type = other RNA
gacaggattcccaaggcaaca

SEQ ID NO: 6008 - RNA, 21 nt, synthetic construct
  misc_feature 1..21: note = Synthetic
  source 1..21: mol_type = other RNA
acaggattcccaaggcaacaa

SEQ ID NO: 6009 - RNA, 21 nt, synthetic construct
  misc_feature 1..21: note = Synthetic
  source 1..21: mol_type = other RNA
caggattcccaaggcaacaac

SEQ ID NO: 6010 - RNA, 21 nt, synthetic construct
  misc_feature 1..21: note = Synthetic
  source 1..21: mol_type = other RNA
aggattcccaaggcaacaaca

SEQ ID NO: 6011 - RNA, 21 nt, synthetic construct
  misc_feature 1..21: note = Synthetic
  source 1..21: mol_type = other RNA
ggattcccaaggcaacaacaa

SEQ ID NO: 6012 - RNA, 21 nt, synthetic construct
  misc_feature 1..21: note = Synthetic
  source 1..21: mol_type = other RNA
gattcccaaggcaacaacaat

SEQ ID NO: 6013 - RNA, 21 nt, synthetic construct
  misc_feature 1..21: note = Synthetic
  source 1..21: mol_type = other RNA
attcccaaggcaacaacaatg

SEQ ID NO: 6014 - RNA, 21 nt, synthetic construct
  misc_feature 1..21: note = Synthetic
  source 1..21: mol_type = other RNA
ttcccaaggcaacaacaatga

SEQ ID NO: 6015 - RNA, 21 nt, synthetic construct
  misc_feature 1..21: note = Synthetic
  source 1..21: mol_type = other RNA
tcccaaggcaacaacaatgac

SEQ ID NO: 6016 - RNA, 21 nt, synthetic construct
  misc_feature 1..21: note = Synthetic
  source 1..21: mol_type = other RNA
cccaaggcaacaacaatgaca

SEQ ID NO: 6017 - RNA, 21 nt, synthetic construct
  misc_feature 1..21: note = Synthetic
  source 1..21: mol_type = other RNA
ccaaggcaacaacaatgacaa

SEQ ID NO: 6018 - RNA, 21 nt, synthetic construct
  misc_feature 1..21: note = Synthetic
  source 1..21: mol_type = other RNA
caaggcaacaacaatgacaaa

SEQ ID NO: 6019 - RNA, 21 nt, synthetic construct
  misc_feature 1..21: note = Synthetic
  source 1..21: mol_type = other RNA
aaggcaacaacaatgacaaag

SEQ ID NO: 6020 - RNA, 21 nt, synthetic construct
  misc_feature 1..21: note = Synthetic
  source 1..21: mol_type = other RNA
aggcaacaacaatgacaaagg

SEQ ID NO: 6021 - RNA, 21 nt, synthetic construct
  misc_feature 1..21: note = Synthetic
  source 1..21: mol_type = other RNA
ggcaacaacaatgacaaaggt

SEQ ID NO: 6022 - RNA, 21 nt, synthetic construct
  misc_feature 1..21: note = Synthetic
  source 1..21: mol_type = other RNA
gcaacaacaatgacaaaggta

SEQ ID NO: 6023 - RNA, 21 nt, synthetic construct
  misc_feature 1..21: note = Synthetic
  source 1..21: mol_type = other RNA
caacaacaatgacaaaggtag

SEQ ID NO: 6024 - RNA, 21 nt, synthetic construct
  misc_feature 1..21: note = Synthetic
  source 1..21: mol_type = other RNA
aacaacaatgacaaaggtagc

SEQ ID NO: 6025 - RNA, 21 nt, synthetic construct
  misc_feature 1..21: note = Synthetic
  source 1..21: mol_type = other RNA
acaacaatgacaaaggtagca

SEQ ID NO: 6026 - RNA, 21 nt, synthetic construct
  misc_feature 1..21: note = Synthetic
  source 1..21: mol_type = other RNA
caacaatgacaaaggtagcaa

SEQ ID NO: 6027 - RNA, 21 nt, synthetic construct
  misc_feature 1..21: note = Synthetic
  source 1..21: mol_type = other RNA
aacaatgacaaaggtagcaat

SEQ ID NO: 6028 - RNA, 21 nt, synthetic construct
  misc_feature 1..21: note = Synthetic
  source 1..21: mol_type = other RNA
acaatgacaaaggtagcaatg

SEQ ID NO: 6029 - RNA, 21 nt, synthetic construct
  misc_feature 1..21: note = Synthetic
  source 1..21: mol_type = other RNA
caatgacaaaggtagcaatga

SEQ ID NO: 6030 - RNA, 21 nt, synthetic construct
  misc_feature 1..21: note = Synthetic
  source 1..21: mol_type = other RNA
aatgacaaaggtagcaatgat

SEQ ID NO: 6031 - RNA, 21 nt, synthetic construct
  misc_feature 1..21: note = Synthetic
  source 1..21: mol_type = other RNA
atgacaaaggtagcaatgata

SEQ ID NO: 6032 - RNA, 21 nt, synthetic construct
  misc_feature 1..21: note = Synthetic
  source 1..21: mol_type = other RNA
tgacaaaggtagcaatgataa

SEQ ID NO: 6033 - RNA, 21 nt, synthetic construct
  misc_feature 1..21: note = Synthetic
  source 1..21: mol_type = other RNA
gacaaaggtagcaatgataac

SEQ ID NO: 6034 - RNA, 21 nt, synthetic construct
  misc_feature 1..21: note = Synthetic
  source 1..21: mol_type = other RNA
acaaaggtagcaatgataaca

SEQ ID NO: 6035 - RNA, 21 nt, synthetic construct
  misc_feature 1..21: note = Synthetic
  source 1..21: mol_type = other RNA
caaaggtagcaatgataacat

SEQ ID NO: 6036 - RNA, 21 nt, synthetic construct
  misc_feature 1..21: note = Synthetic
  source 1..21: mol_type = other RNA
aaaggtagcaatgataacata

SEQ ID NO: 6037 - RNA, 21 nt, synthetic construct
  misc_feature 1..21: note = Synthetic
  source 1..21: mol_type = other RNA
aaggtagcaatgataacatat

SEQ ID NO: 6038 - RNA, 21 nt, synthetic construct
  misc_feature 1..21: note = Synthetic
  source 1..21: mol_type = other RNA
aggtagcaatgataacatata

SEQ ID NO: 6039 - RNA, 21 nt, synthetic construct
  misc_feature 1..21: note = Synthetic
  source 1..21: mol_type = other RNA
ggtagcaatgataacatataa

SEQ ID NO: 6040 - RNA, 21 nt, synthetic construct
  misc_feature 1..21: note = Synthetic
  source 1..21: mol_type = other RNA
gtagcaatgataacatataac

SEQ ID NO: 6041 - RNA, 21 nt, synthetic construct
  misc_feature 1..21: note = Synthetic
  source 1..21: mol_type = other RNA
tagcaatgataacatataaca

SEQ ID NO: 6042 - RNA, 21 nt, synthetic construct
  misc_feature 1..21: note = Synthetic
  source 1..21: mol_type = other RNA
agcaatgataacatataacac

SEQ ID NO: 6043 - RNA, 21 nt, synthetic construct
  misc_feature 1..21: note = Synthetic
  source 1..21: mol_type = other RNA
gcaatgataacatataacacg

SEQ ID NO: 6044 - RNA, 21 nt, synthetic construct
  misc_feature 1..21: note = Synthetic
  source 1..21: mol_type = other RNA
caatgataacatataacacgc

SEQ ID NO: 6045 - RNA, 21 nt, synthetic construct
  misc_feature 1..21: note = Synthetic
  source 1..21: mol_type = other RNA
aatgataacatataacacgct

SEQ ID NO: 6046 - RNA, 21 nt, synthetic construct
  misc_feature 1..21: note = Synthetic
  source 1..21: mol_type = other RNA
atgataacatataacacgctc

SEQ ID NO: 6047 - RNA, 21 nt, synthetic construct
  misc_feature 1..21: note = Synthetic
  source 1..21: mol_type = other RNA
tgataacatataacacgctcc

SEQ ID NO: 6048 - RNA, 21 nt, synthetic construct
  misc_feature 1..21: note = Synthetic
  source 1..21: mol_type = other RNA
gataacatataacacgctcca

SEQ ID NO: 6049 - RNA, 21 nt, synthetic construct
  misc_feature 1..21: note = Synthetic
  source 1..21: mol_type = other RNA
ataacatataacacgctccac

SEQ ID NO: 6050 - RNA, 21 nt, synthetic construct
  misc_feature 1..21: note = Synthetic
  source 1..21: mol_type = other RNA
taacatataacacgctccact

SEQ ID NO: 6051 - RNA, 21 nt, synthetic construct
  misc_feature 1..21: note = Synthetic
  source 1..21: mol_type = other RNA
aacatataacacgctccactc

SEQ ID NO: 6052 - RNA, 21 nt, synthetic construct
  misc_feature 1..21: note = Synthetic
  source 1..21: mol_type = other RNA
acatataacacgctccactca

SEQ ID NO: 6053 - RNA, 21 nt, synthetic construct
  misc_feature 1..21: note = Synthetic
  source 1..21: mol_type = other RNA
catataacacgctccactcac

SEQ ID NO: 6054 - RNA, 21 nt, synthetic construct
  misc_feature 1..21: note = Synthetic
  source 1..21: mol_type = other RNA
atataacacgctccactcaca

SEQ ID NO: 6055 - RNA, 21 nt, synthetic construct
  misc_feature 1..21: note = Synthetic
  source 1..21: mol_type = other RNA
tataacacgctccactcacag

SEQ ID NO: 6056 - RNA, 21 nt, synthetic construct
  misc_feature 1..21: note = Synthetic
  source 1..21: mol_type = other RNA
ataacacgctccactcacagt

SEQ ID NO: 6057 - RNA, 21 nt, synthetic construct
  misc_feature 1..21: note = Synthetic
  source 1..21: mol_type = other RNA
taacacgctccactcacagtt

SEQ ID NO: 6058 - RNA, 21 nt, synthetic construct
  misc_feature 1..21: note = Synthetic
  source 1..21: mol_type = other RNA
aacacgctccactcacagttg

SEQ ID NO: 6059 - RNA, 21 nt, synthetic construct
  misc_feature 1..21: note = Synthetic
  source 1..21: mol_type = other RNA
acacgctccactcacagttgc

SEQ ID NO: 6060 - RNA, 21 nt, synthetic construct
  misc_feature 1..21: note = Synthetic
  source 1..21: mol_type = other RNA
cacgctccactcacagttgct

SEQ ID NO: 6061 - RNA, 21 nt, synthetic construct
  misc_feature 1..21: note = Synthetic
  source 1..21: mol_type = other RNA
acgctccactcacagttgctg

SEQ ID NO: 6062 - RNA, 21 nt, synthetic construct
  misc_feature 1..21: note = Synthetic
  source 1..21: mol_type = other RNA
cgctccactcacagttgctgt

SEQ ID NO: 6063 - RNA, 21 nt, synthetic construct
  misc_feature 1..21: note = Synthetic
  source 1..21: mol_type = other RNA
gctccactcacagttgctgtc

SEQ ID NO: 6064 - RNA, 21 nt, synthetic construct
  misc_feature 1..21: note = Synthetic
  source 1..21: mol_type = other RNA
ctccactcacagttgctgtct

SEQ ID NO: 6065 - RNA, 21 nt, synthetic construct
  misc_feature 1..21: note = Synthetic
  source 1..21: mol_type = other RNA
tccactcacagttgctgtctc

SEQ ID NO: 6066 - RNA, 21 nt, synthetic construct
  misc_feature 1..21: note = Synthetic
  source 1..21: mol_type = other RNA
ccactcacagttgctgtctcc

SEQ ID NO: 6067 - RNA, 21 nt, synthetic construct
  misc_feature 1..21: note = Synthetic
  source 1..21: mol_type = other RNA
cactcacagttgctgtctcca

SEQ ID NO: 6068 - RNA, 21 nt, synthetic construct
  misc_feature 1..21: note = Synthetic
  source 1..21: mol_type = other RNA
actcacagttgctgtctccat

SEQ ID NO: 6069 - RNA, 21 nt, synthetic construct
  misc_feature 1..21: note = Synthetic
  source 1..21: mol_type = other RNA
ctcacagttgctgtctccatc

SEQ ID NO: 6070 - RNA, 21 nt, synthetic construct
  misc_feature 1..21: note = Synthetic
  source 1..21: mol_type = other RNA
tcacagttgctgtctccatcc

SEQ ID NO: 6071 - RNA, 21 nt, synthetic construct
  misc_feature 1..21: note = Synthetic
  source 1..21: mol_type = other RNA
cacagttgctgtctccatccc

SEQ ID NO: 6072 - RNA, 21 nt, synthetic construct
  misc_feature 1..21: note = Synthetic
  source 1..21: mol_type = other RNA
acagttgctgtctccatccct

SEQ ID NO: 6073 - RNA, 21 nt, synthetic construct
  misc_feature 1..21: note = Synthetic
  source 1..21: mol_type = other RNA
cagttgctgtctccatccctc

SEQ ID NO: 6074 - RNA, 21 nt, synthetic construct
  misc_feature 1..21: note = Synthetic
  source 1..21: mol_type = other RNA
agttgctgtctccatccctca

SEQ ID NO: 6075 - RNA, 21 nt, synthetic construct
  misc_feature 1..21: note = Synthetic
  source 1..21: mol_type = other RNA
gttgctgtctccatccctcag

SEQ ID NO: 6076 - RNA, 21 nt, synthetic construct
  misc_feature 1..21: note = Synthetic
  source 1..21: mol_type = other RNA
ttgctgtctccatccctcagc

SEQ ID NO: 6077 - RNA, 21 nt, synthetic construct
  misc_feature 1..21: note = Synthetic
  source 1..21: mol_type = other RNA
tgctgtctccatccctcagct

SEQ ID NO: 6078 - RNA, 21 nt, synthetic construct
  misc_feature 1..21: note = Synthetic
  source 1..21: mol_type = other RNA
gctgtctccatccctcagctg

SEQ ID NO: 6079 - RNA, 21 nt, synthetic construct
  misc_feature 1..21: note = Synthetic
  source 1..21: mol_type = other RNA
ctgtctccatccctcagctgc

SEQ ID NO: 6080 - RNA, 21 nt, synthetic construct
  misc_feature 1..21: note = Synthetic
  source 1..21: mol_type = other RNA
tgtctccatccctcagctgca

SEQ ID NO: 6081 - RNA, 21 nt, synthetic construct
  misc_feature 1..21: note = Synthetic
  source 1..21: mol_type = other RNA
gtctccatccctcagctgcac

SEQ ID NO: 6082 - RNA, 21 nt, synthetic construct
  misc_feature 1..21: note = Synthetic
  source 1..21: mol_type = other RNA
tctccatccctcagctgcacc

SEQ ID NO: 6083 - RNA, 21 nt, synthetic construct
  misc_feature 1..21: note = Synthetic
  source 1..21: mol_type = other RNA
ctccatccctcagctgcacct

SEQ ID NO: 6084 - RNA, 21 nt, synthetic construct
  misc_feature 1..21: note = Synthetic
  source 1..21: mol_type = other RNA
tccatccctcagctgcacctt

SEQ ID NO: 6085 - RNA, 21 nt, synthetic construct
  misc_feature 1..21: note = Synthetic
  source 1..21: mol_type = other RNA
ccatccctcagctgcaccttg

SEQ ID NO: 6086 - RNA, 21 nt, synthetic construct
  misc_feature 1..21: note = Synthetic
  source 1..21: mol_type = other RNA
catccctcagctgcaccttga

SEQ ID NO: 6087 - RNA, 21 nt, synthetic construct
  misc_feature 1..21: note = Synthetic
  source 1..21: mol_type = other RNA
atccctcagctgcaccttgat

SEQ ID NO: 6088 - RNA, 21 nt, synthetic construct
  misc_feature 1..21: note = Synthetic
  source 1..21: mol_type = other RNA
tccctcagctgcaccttgatg

SEQ ID NO: 6089 - RNA, 21 nt, synthetic construct
  misc_feature 1..21: note = Synthetic
  source 1..21: mol_type = other RNA
ccctcagctgcaccttgatga

SEQ ID NO: 6090 - RNA, 21 nt, synthetic construct
  misc_feature 1..21: note = Synthetic
  source 1..21: mol_type = other RNA
cctcagctgcaccttgatgaa

SEQ ID NO: 6091 - RNA, 21 nt, synthetic construct
  misc_feature 1..21: note = Synthetic
  source 1..21: mol_type = other RNA
ctcagctgcaccttgatgaaa

SEQ ID NO: 6092 - RNA, 21 nt, synthetic construct
  misc_feature 1..21: note = Synthetic
  source 1..21: mol_type = other RNA
tcagctgcaccttgatgaaat

SEQ ID NO: 6093 - RNA, 21 nt, synthetic construct
  misc_feature 1..21: note = Synthetic
  source 1..21: mol_type = other RNA
cagctgcaccttgatgaaatt

SEQ ID NO: 6094 - RNA, 21 nt, synthetic construct
  misc_feature 1..21: note = Synthetic
  source 1..21: mol_type = other RNA
agctgcaccttgatgaaattc

SEQ ID NO: 6095 - RNA, 21 nt, synthetic construct
  misc_feature 1..21: note = Synthetic
  source 1..21: mol_type = other RNA
gctgcaccttgatgaaattct

SEQ ID NO: 6096 - RNA, 21 nt, synthetic construct
  misc_feature 1..21: note = Synthetic
  source 1..21: mol_type = other RNA
ctgcaccttgatgaaattctc

SEQ ID NO: 6097 - RNA, 21 nt, synthetic construct
  misc_feature 1..21: note = Synthetic
  source 1..21: mol_type = other RNA
tgcaccttgatgaaattctcc

SEQ ID NO: 6098 - RNA, 21 nt, synthetic construct
  misc_feature 1..21: note = Synthetic
  source 1..21: mol_type = other RNA
gcaccttgatgaaattctcca

SEQ ID NO: 6099 - RNA, 21 nt, synthetic construct
  misc_feature 1..21: note = Synthetic
  source 1..21: mol_type = other RNA
caccttgatgaaattctccat

SEQ ID NO: 6100 - RNA, 21 nt, synthetic construct
  misc_feature 1..21: note = Synthetic
  source 1..21: mol_type = other RNA
accttgatgaaattctccatc

SEQ ID NO: 6101 - RNA, 21 nt, synthetic construct
  misc_feature 1..21: note = Synthetic
  source 1..21: mol_type = other RNA
ccttgatgaaattctccatcc

SEQ ID NO: 6102 - RNA, 21 nt, synthetic construct
  misc_feature 1..21: note = Synthetic
  source 1..21: mol_type = other RNA
cttgatgaaattctccatcca

SEQ ID NO: 6103 - RNA, 21 nt, synthetic construct
  misc_feature 1..21: note = Synthetic
  source 1..21: mol_type = other RNA
ttgatgaaattctccatccaa

SEQ ID NO: 6104 - RNA, 21 nt, synthetic construct
  misc_feature 1..21: note = Synthetic
  source 1..21: mol_type = other RNA
tgatgaaattctccatccaaa

SEQ ID NO: 6105 - RNA, 21 nt, synthetic construct
  misc_feature 1..21: note = Synthetic
  source 1..21: mol_type = other RNA
gatgaaattctccatccaaaa

SEQ ID NO: 6106 - RNA, 21 nt, synthetic construct
  misc_feature 1..21: note = Synthetic
  source 1..21: mol_type = other RNA
atgaaattctccatccaaaaa

SEQ ID NO: 6107 - RNA, 21 nt, synthetic construct
  misc_feature 1..21: note = Synthetic
  source 1..21: mol_type = other RNA
tgaaattctccatccaaaaag

SEQ ID NO: 6108 - RNA, 21 nt, synthetic construct
  misc_feature 1..21: note = Synthetic
  source 1..21: mol_type = other RNA
gaaattctccatccaaaaagg

SEQ ID NO: 6109 - RNA, 21 nt, synthetic construct
  misc_feature 1..21: note = Synthetic
  source 1..21: mol_type = other RNA
aaattctccatccaaaaaggg

SEQ ID NO: 6110 - RNA, 21 nt, synthetic construct
  misc_feature 1..21: note = Synthetic
  source 1..21: mol_type = other RNA
aattctccatccaaaaagggt

SEQ ID NO: 6111 - RNA, 21 nt, synthetic construct
  misc_feature 1..21: note = Synthetic
  source 1..21: mol_type = other RNA
attctccatccaaaaagggtc

SEQ ID NO: 6112 - RNA, 21 nt, synthetic construct
  misc_feature 1..21: note = Synthetic
  source 1..21: mol_type = other RNA
ttctccatccaaaaagggtca

SEQ ID NO: 6113 - RNA, 21 nt, synthetic construct
  misc_feature 1..21: note = Synthetic
  source 1..21: mol_type = other RNA
tctccatccaaaaagggtcac

SEQ ID NO: 6114 - RNA, 21 nt, synthetic construct
  misc_feature 1..21: note = Synthetic
  source 1..21: mol_type = other RNA
ctccatccaaaaagggtcaca

SEQ ID NO: 6115 - RNA, 21 nt, synthetic construct
  misc_feature 1..21: note = Synthetic
  source 1..21: mol_type = other RNA
tccatccaaaaagggtcacag

SEQ ID NO: 6116 - RNA, 21 nt, synthetic construct
  misc_feature 1..21: note = Synthetic
  source 1..21: mol_type = other RNA
ccatccaaaaagggtcacaga

SEQ ID NO: 6117 - RNA, 21 nt, synthetic construct
  misc_feature 1..21: note = Synthetic
  source 1..21: mol_type = other RNA
catccaaaaagggtcacagat

SEQ ID NO: 6118 - RNA, 21 nt, synthetic construct
  misc_feature 1..21: note = Synthetic
  source 1..21: mol_type = other RNA
atccaaaaagggtcacagata

SEQ ID NO: 6119 - RNA, 21 nt, synthetic construct
  misc_feature 1..21: note = Synthetic
  source 1..21: mol_type = other RNA
tccaaaaagggtcacagatac

SEQ ID NO: 6120 - RNA, 21 nt, synthetic construct
  misc_feature 1..21: note = Synthetic
  source 1..21: mol_type = other RNA
ccaaaaagggtcacagataca

SEQ ID NO: 6121 - RNA, 21 nt, synthetic construct
  misc_feature 1..21: note = Synthetic
  source 1..21: mol_type = other RNA
caaaaagggtcacagatacag

SEQ ID NO: 6122 - RNA, 21 nt, synthetic construct
  misc_feature 1..21: note = Synthetic
  source 1..21: mol_type = other RNA
aaaaagggtcacagatacagc

SEQ ID NO: 6123 - RNA, 21 nt, synthetic construct
  misc_feature 1..21: note = Synthetic
  source 1..21: mol_type = other RNA
aaaagggtcacagatacagcg

SEQ ID NO: 6124 - RNA, 21 nt, synthetic construct
  misc_feature 1..21: note = Synthetic
  source 1..21: mol_type = other RNA
aaagggtcacagatacagcgt

SEQ ID NO: 6125 - RNA, 21 nt, synthetic construct
  misc_feature 1..21: note = Synthetic
  source 1..21: mol_type = other RNA
aagggtcacagatacagcgtt

SEQ ID NO: 6126 - RNA, 21 nt, synthetic construct
  misc_feature 1..21: note = Synthetic
  source 1..21: mol_type = other RNA
agggtcacagatacagcgttt

SEQ ID NO: 6127 - RNA, 21 nt, synthetic construct
  misc_feature 1..21: note = Synthetic
  source 1..21: mol_type = other RNA
gggtcacagatacagcgtttg

SEQ ID NO: 6128 - RNA, 21 nt, synthetic construct
  misc_feature 1..21: note = Synthetic
  source 1..21: mol_type = other RNA
ggtcacagatacagcgtttgg

SEQ ID NO: 6129 - RNA, 21 nt, synthetic construct
  misc_feature 1..21: note = Synthetic
  source 1..21: mol_type = other RNA
gtcacagatacagcgtttggt

SEQ ID NO: 6130 - RNA, 21 nt, synthetic construct
  misc_feature 1..21: note = Synthetic
  source 1..21: mol_type = other RNA
tcacagatacagcgtttggtg

SEQ ID NO: 6131 - RNA, 21 nt, synthetic construct
  misc_feature 1..21: note = Synthetic
  source 1..21: mol_type = other RNA
cacagatacagcgtttggtga

SEQ ID NO: 6132 - RNA, 21 nt, synthetic construct
  misc_feature 1..21: note = Synthetic
  source 1..21: mol_type = other RNA
acagatacagcgtttggtgaa

SEQ ID NO: 6133 - RNA, 21 nt, synthetic construct
  misc_feature 1..21: note = Synthetic
  source 1..21: mol_type = other RNA
cagatacagcgtttggtgaac

SEQ ID NO: 6134 - RNA, 21 nt, synthetic construct
  misc_feature 1..21: note = Synthetic
  source 1..21: mol_type = other RNA
agatacagcgtttggtgaacg

SEQ ID NO: 6135 - RNA, 21 nt, synthetic construct
  misc_feature 1..21: note = Synthetic
  source 1..21: mol_type = other RNA
gatacagcgtttggtgaacga

SEQ ID NO: 6136 - RNA, 21 nt, synthetic construct
  misc_feature 1..21: note = Synthetic
  source 1..21: mol_type = other RNA
atacagcgtttggtgaacgag

SEQ ID NO: 6137 - RNA, 21 nt, synthetic construct
  misc_feature 1..21: note = Synthetic
  source 1..21: mol_type = other RNA
tacagcgtttggtgaacgagt

SEQ ID NO: 6138 - RNA, 21 nt, synthetic construct
  misc_feature 1..21: note = Synthetic
  source 1..21: mol_type = other RNA
acagcgtttggtgaacgagtc

SEQ ID NO: 6139 - RNA, 21 nt, synthetic construct
  misc_feature 1..21: note = Synthetic
  source 1..21: mol_type = other RNA
cagcgtttggtgaacgagtca

SEQ ID NO: 6140 - RNA, 21 nt, synthetic construct
  misc_feature 1..21: note = Synthetic
  source 1..21: mol_type = other RNA
agcgtttggtgaacgagtcac

SEQ ID NO: 6141 - RNA, 21 nt, synthetic construct
  misc_feature 1..21: note = Synthetic
  source 1..21: mol_type = other RNA
gcgtttggtgaacgagtcaca

SEQ ID NO: 6142 - RNA, 21 nt, synthetic construct
  misc_feature 1..21: note = Synthetic
  source 1..21: mol_type = other RNA
cgtttggtgaacgagtcacag

SEQ ID NO: 6143 - RNA, 21 nt, synthetic construct
  misc_feature 1..21: note = Synthetic
  source 1..21: mol_type = other RNA
gtttggtgaacgagtcacagt

SEQ ID NO: 6144 - RNA, 21 nt, synthetic construct
  misc_feature 1..21: note = Synthetic
  source 1..21: mol_type = other RNA
tttggtgaacgagtcacagtg

SEQ ID NO: 6145 - RNA, 21 nt, synthetic construct
  misc_feature 1..21: note = Synthetic
  source 1..21: mol_type = other RNA
ttggtgaacgagtcacagtgg

SEQ ID NO: 6146 - RNA, 21 nt, synthetic construct
  misc_feature 1..21: note = Synthetic
  source 1..21: mol_type = other RNA
tggtgaacgagtcacagtggc

SEQ ID NO: 6147 - RNA, 21 nt, synthetic construct
  misc_feature 1..21: note = Synthetic
  source 1..21: mol_type = other RNA
ggtgaacgagtcacagtggcc

SEQ ID NO: 6148 - RNA, 21 nt, synthetic construct
  misc_feature 1..21: note = Synthetic
  source 1..21: mol_type = other RNA
gtgaacgagtcacagtggcca

SEQ ID NO: 6149 - RNA, 21 nt, synthetic construct
  misc_feature 1..21: note = Synthetic
  source 1..21: mol_type = other RNA
tgaacgagtcacagtggccat

SEQ ID NO: 6150 - RNA, 21 nt, synthetic construct
  misc_feature 1..21: note = Synthetic
  source 1..21: mol_type = other RNA
gaacgagtcacagtggccatg

SEQ ID NO: 6151 - RNA, 21 nt, synthetic construct
  misc_feature 1..21: note = Synthetic
  source 1..21: mol_type = other RNA
aacgagtcacagtggccatgg

SEQ ID NO: 6152 - RNA, 21 nt, synthetic construct
  misc_feature 1..21: note = Synthetic
  source 1..21: mol_type = other RNA
acgagtcacagtggccatggt

SEQ ID NO: 6153 - RNA, 21 nt, synthetic construct
  misc_feature 1..21: note = Synthetic
  source 1..21: mol_type = other RNA
cgagtcacagtggccatggtc

SEQ ID NO: 6154 - RNA, 21 nt, synthetic construct
  misc_feature 1..21: note = Synthetic
  source 1..21: mol_type = other RNA
gagtcacagtggccatggtcg

SEQ ID NO: 6155 - RNA, 21 nt, synthetic construct
  misc_feature 1..21: note = Synthetic
  source 1..21: mol_type = other RNA
agtcacagtggccatggtcgg

SEQ ID NO: 6156 - RNA, 21 nt, synthetic construct
  misc_feature 1..21: note = Synthetic
  source 1..21: mol_type = other RNA
gtcacagtggccatggtcgga

SEQ ID NO: 6157 - RNA, 21 nt, synthetic construct
  misc_feature 1..21: note = Synthetic
  source 1..21: mol_type = other RNA
tcacagtggccatggtcggaa

SEQ ID NO: 6158 - RNA, 21 nt, synthetic construct
  misc_feature 1..21: note = Synthetic
  source 1..21: mol_type = other RNA
cacagtggccatggtcggaac

SEQ ID NO: 6159 - RNA, 21 nt, synthetic construct
  misc_feature 1..21: note = Synthetic
  source 1..21: mol_type = other RNA
acagtggccatggtcggaaca

SEQ ID NO: 6160 - RNA, 21 nt, synthetic construct
  misc_feature 1..21: note = Synthetic
  source 1..21: mol_type = other RNA
cagtggccatggtcggaacag

SEQ ID NO: 6161 - RNA, 21 nt, synthetic construct
  misc_feature 1..21: note = Synthetic
  source 1..21: mol_type = other RNA
agtggccatggtcggaacagt

SEQ ID NO: 6162 - RNA, 21 nt, synthetic construct
  misc_feature 1..21: note = Synthetic
  source 1..21: mol_type = other RNA
gtggccatggtcggaacagtt

SEQ ID NO: 6163 - RNA, 21 nt, synthetic construct
  misc_feature 1..21: note = Synthetic
  source 1..21: mol_type = other RNA
tggccatggtcggaacagttc

SEQ ID NO: 6164 - RNA, 21 nt, synthetic construct
  misc_feature 1..21: note = Synthetic
  source 1..21: mol_type = other RNA
ggccatggtcggaacagttca

SEQ ID NO: 6165 - RNA, 21 nt, synthetic construct
  misc_feature 1..21: note = Synthetic
  source 1..21: mol_type = other RNA
gccatggtcggaacagttcag

SEQ ID NO: 6166 - RNA, 21 nt, synthetic construct
  misc_feature 1..21: note = Synthetic
  source 1..21: mol_type = other RNA
ccatggtcggaacagttcagc

SEQ ID NO: 6167 - RNA, 21 nt, synthetic construct
  misc_feature 1..21: note = Synthetic
  source 1..21: mol_type = other RNA
catggtcggaacagttcagct

SEQ ID NO: 6168 - RNA, 21 nt, synthetic construct
  misc_feature 1..21: note = Synthetic
  source 1..21: mol_type = other RNA
atggtcggaacagttcagctg

SEQ ID NO: 6169 - RNA, 21 nt, synthetic construct
  misc_feature 1..21: note = Synthetic
  source 1..21: mol_type = other RNA
tggtcggaacagttcagctga

SEQ ID NO: 6170 - RNA, 21 nt, synthetic construct
  misc_feature 1..21: note = Synthetic
  source 1..21: mol_type = other RNA
ggtcggaacagttcagctgac

SEQ ID NO: 6171 - RNA, 21 nt, synthetic construct
  misc_feature 1..21: note = Synthetic
  source 1..21: mol_type = other RNA
gtcggaacagttcagctgaca

SEQ ID NO: 6172 - RNA, 21 nt, synthetic construct
  misc_feature 1..21: note = Synthetic
  source 1..21: mol_type = other RNA
tcggaacagttcagctgacat

SEQ ID NO: 6173 - RNA, 21 nt, synthetic construct
  misc_feature 1..21: note = Synthetic
  source 1..21: mol_type = other RNA
cggaacagttcagctgacatg

SEQ ID NO: 6174 - RNA, 21 nt, synthetic construct
  misc_feature 1..21: note = Synthetic
  source 1..21: mol_type = other RNA
ggaacagttcagctgacatgt

SEQ ID NO: 6175 - RNA, 21 nt, synthetic construct
  misc_feature 1..21: note = Synthetic
  source 1..21: mol_type = other RNA
gaacagttcagctgacatgtg

SEQ ID NO: 6176 - RNA, 21 nt, synthetic construct
  misc_feature 1..21: note = Synthetic
  source 1..21: mol_type = other RNA
aacagttcagctgacatgtga

SEQ ID NO: 6177 - RNA, 21 nt, synthetic construct
  misc_feature 1..21: note = Synthetic
  source 1..21: mol_type = other RNA
acagttcagctgacatgtgac

SEQ ID NO: 6178 - RNA, 21 nt, synthetic construct
  misc_feature 1..21: note = Synthetic
  source 1..21: mol_type = other RNA
cagttcagctgacatgtgaca

SEQ ID NO: 6179 - RNA, 21 nt, synthetic construct
  misc_feature 1..21: note = Synthetic
  source 1..21: mol_type = other RNA
agttcagctgacatgtgacag

SEQ ID NO: 6180 - RNA, 21 nt, synthetic construct
  misc_feature 1..21: note = Synthetic
  source 1..21: mol_type = other RNA
gttcagctgacatgtgacagt

SEQ ID NO: 6181 - RNA, 21 nt, synthetic construct
  misc_feature 1..21: note = Synthetic
  source 1..21: mol_type = other RNA
ttcagctgacatgtgacagtg

SEQ ID NO: 6182 - RNA, 21 nt, synthetic construct
  misc_feature 1..21: note = Synthetic
  source 1..21: mol_type = other RNA
tcagctgacatgtgacagtgt

SEQ ID NO: 6183 - RNA, 21 nt, synthetic construct
  misc_feature 1..21: note = Synthetic
  source 1..21: mol_type = other RNA
cagctgacatgtgacagtgtt

SEQ ID NO: 6184 - RNA, 21 nt, synthetic construct
  misc_feature 1..21: note = Synthetic
  source 1..21: mol_type = other RNA
agctgacatgtgacagtgttg

SEQ ID NO: 6185 - RNA, 21 nt, synthetic construct
  misc_feature 1..21: note = Synthetic
  source 1..21: mol_type = other RNA
gctgacatgtgacagtgttga

SEQ ID NO: 6186 - RNA, 21 nt, synthetic construct
  misc_feature 1..21: note = Synthetic
  source 1..21: mol_type = other RNA
ctgacatgtgacagtgttgac

SEQ ID NO: 6187 - RNA, 21 nt, synthetic construct
  misc_feature 1..21: note = Synthetic
  source 1..21: mol_type = other RNA
tgacatgtgacagtgttgact

SEQ ID NO: 6188 - RNA, 21 nt, synthetic construct
  misc_feature 1..21: note = Synthetic
  source 1..21: mol_type = other RNA
gacatgtgacagtgttgactt

SEQ ID NO: 6189 - RNA, 21 nt, synthetic construct
  misc_feature 1..21: note = Synthetic
  source 1..21: mol_type = other RNA
acatgtgacagtgttgacttc

SEQ ID NO: 6190 - RNA, 21 nt, synthetic construct
  misc_feature 1..21: note = Synthetic
  source 1..21: mol_type = other RNA
catgtgacagtgttgacttcc

SEQ ID NO: 6191 - RNA, 21 nt, synthetic construct
  misc_feature 1..21: note = Synthetic
  source 1..21: mol_type = other RNA
atgtgacagtgttgacttcca

SEQ ID NO: 6192 - RNA, 21 nt, synthetic construct
  misc_feature 1..21: note = Synthetic
  source 1..21: mol_type = other RNA
tgtgacagtgttgacttccaa

SEQ ID NO: 6193 - RNA, 21 nt, synthetic construct
  misc_feature 1..21: note = Synthetic
  source 1..21: mol_type = other RNA
gtgacagtgttgacttccaag

SEQ ID NO: 6194 - RNA, 21 nt, synthetic construct
  misc_feature 1..21: note = Synthetic
  source 1..21: mol_type = other RNA
tgacagtgttgacttccaagg

SEQ ID NO: 6195 - RNA, 21 nt, synthetic construct
  misc_feature 1..21: note = Synthetic
  source 1..21: mol_type = other RNA
gacagtgttgacttccaaggc

SEQ ID NO: 6196 - RNA, 21 nt, synthetic construct
  misc_feature 1..21: note = Synthetic
  source 1..21: mol_type = other RNA
acagtgttgacttccaaggct

SEQ ID NO: 6197 - RNA, 21 nt, synthetic construct
  misc_feature 1..21: note = Synthetic
  source 1..21: mol_type = other RNA
cagtgttgacttccaaggctc

SEQ ID NO: 6198 - RNA, 21 nt, synthetic construct
  misc_feature 1..21: note = Synthetic
  source 1..21: mol_type = other RNA
agtgttgacttccaaggctct

SEQ ID NO: 6199 - RNA, 21 nt, synthetic construct
  misc_feature 1..21: note = Synthetic
  source 1..21: mol_type = other RNA
gtgttgacttccaaggctctg

SEQ ID NO: 6200 - RNA, 21 nt, synthetic construct
  misc_feature 1..21: note = Synthetic
  source 1..21: mol_type = other RNA
tgttgacttccaaggctctga

SEQ ID NO: 6201 - RNA, 21 nt, synthetic construct
  misc_feature 1..21: note = Synthetic
  source 1..21: mol_type = other RNA
gttgacttccaaggctctgaa

SEQ ID NO: 6202 - RNA, 21 nt, synthetic construct
  misc_feature 1..21: note = Synthetic
  source 1..21: mol_type = other RNA
ttgacttccaaggctctgaat

SEQ ID NO: 6203 - RNA, 21 nt, synthetic construct
  misc_feature 1..21: note = Synthetic
  source 1..21: mol_type = other RNA
tgacttccaaggctctgaata

SEQ ID NO: 6204 - RNA, 21 nt, synthetic construct
  misc_feature 1..21: note = Synthetic
  source 1..21: mol_type = other RNA
gacttccaaggctctgaatat

SEQ ID NO: 6205 - RNA, 21 nt, synthetic construct
  misc_feature 1..21: note = Synthetic
  source 1..21: mol_type = other RNA
acttccaaggctctgaatatc

SEQ ID NO: 6206 - RNA, 21 nt, synthetic construct
  misc_feature 1..21: note = Synthetic
  source 1..21: mol_type = other RNA
cttccaaggctctgaatatca

SEQ ID NO: 6207 - RNA, 21 nt, synthetic construct
  misc_feature 1..21: note = Synthetic
  source 1..21: mol_type = other RNA
ttccaaggctctgaatatcaa

SEQ ID NO: 6208 - RNA, 21 nt, synthetic construct
  misc_feature 1..21: note = Synthetic
  source 1..21: mol_type = other RNA
tccaaggctctgaatatcaaa

SEQ ID NO: 6209 - RNA, 21 nt, synthetic construct
  misc_feature 1..21: note = Synthetic
  source 1..21: mol_type = other RNA
ccaaggctctgaatatcaaaa

SEQ ID NO: 6210 - RNA, 21 nt, synthetic construct
  misc_feature 1..21: note = Synthetic
  source 1..21: mol_type = other RNA
caaggctctgaatatcaaaaa

SEQ ID NO: 6211 - RNA, 21 nt, synthetic construct
  misc_feature 1..21: note = Synthetic
  source 1..21: mol_type = other RNA
aaggctctgaatatcaaaaag

SEQ ID NO: 6212 - RNA, 21 nt, synthetic construct
  misc_feature 1..21: note = Synthetic
  source 1..21: mol_type = other RNA
aggctctgaatatcaaaaagt

SEQ ID NO: 6213 - RNA, 21 nt, synthetic construct
  misc_feature 1..21: note = Synthetic
  source 1..21: mol_type = other RNA
ggctctgaatatcaaaaagtc

SEQ ID NO: 6214 - RNA, 21 nt, synthetic construct
  misc_feature 1..21: note = Synthetic
  source 1..21: mol_type = other RNA
gctctgaatatcaaaaagtct

SEQ ID NO: 6215 - RNA, 21 nt, synthetic construct
  misc_feature 1..21: note = Synthetic
  source 1..21: mol_type = other RNA
ctctgaatatcaaaaagtctg

SEQ ID NO: 6216 - RNA, 21 nt, synthetic construct
  misc_feature 1..21: note = Synthetic
  source 1..21: mol_type = other RNA
tctgaatatcaaaaagtctgc

SEQ ID NO: 6217 - RNA, 21 nt, synthetic construct
  misc_feature 1..21: note = Synthetic
  source 1..21: mol_type = other RNA
ctgaatatcaaaaagtctgcc

SEQ ID NO: 6218 - RNA, 21 nt, synthetic construct
  misc_feature 1..21: note = Synthetic
  source 1..21: mol_type = other RNA
tgaatatcaaaaagtctgcct

SEQ ID NO: 6219 - RNA, 21 nt, synthetic construct
  misc_feature 1..21: note = Synthetic
  source 1..21: mol_type = other RNA
gaatatcaaaaagtctgcctt

SEQ ID NO: 6220 - RNA, 21 nt, synthetic construct
  misc_feature 1..21: note = Synthetic
  source 1..21: mol_type = other RNA
aatatcaaaaagtctgccttt

SEQ ID NO: 6221 - RNA, 21 nt, synthetic construct
  misc_feature 1..21: note = Synthetic
  source 1..21: mol_type = other RNA
atatcaaaaagtctgcctttt

SEQ ID NO: 6222 - RNA, 21 nt, synthetic construct
  misc_feature 1..21: note = Synthetic
  source 1..21: mol_type = other RNA
tatcaaaaagtctgccttttg

SEQ ID NO: 6223 - RNA, 21 nt, synthetic construct
  misc_feature 1..21: note = Synthetic
  source 1..21: mol_type = other RNA
atcaaaaagtctgccttttgc

SEQ ID NO: 6224 - RNA, 21 nt, synthetic construct
  misc_feature 1..21: note = Synthetic
  source 1..21: mol_type = other RNA
tcaaaaagtctgccttttgct

SEQ ID NO: 6225 - RNA, 21 nt, synthetic construct
  misc_feature 1..21: note = Synthetic
  source 1..21: mol_type = other RNA
caaaaagtctgccttttgctt

SEQ ID NO: 6226 - RNA, 21 nt, synthetic construct
  misc_feature 1..21: note = Synthetic
  source 1..21: mol_type = other RNA
aaaaagtctgccttttgcttc

SEQ ID NO: 6227 - RNA, 21 nt, synthetic construct
  misc_feature 1..21: note = Synthetic
  source 1..21: mol_type = other RNA
aaaagtctgccttttgcttcc

SEQ ID NO: 6228 - RNA, 21 nt, synthetic construct
  misc_feature 1..21: note = Synthetic
  source 1..21: mol_type = other RNA
aaagtctgccttttgcttccg

SEQ ID NO: 6229 - RNA, 21 nt, synthetic construct
  misc_feature 1..21: note = Synthetic
  source 1..21: mol_type = other RNA
aagtctgccttttgcttccgc

SEQ ID NO: 6230 - RNA, 21 nt, synthetic construct
  misc_feature 1..21: note = Synthetic
  source 1..21: mol_type = other RNA
agtctgccttttgcttccgca

SEQ ID NO: 6231 - RNA, 21 nt, synthetic construct
  misc_feature 1..21: note = Synthetic
  source 1..21: mol_type = other RNA
gtctgccttttgcttccgcag

SEQ ID NO: 6232 - RNA, 21 nt, synthetic construct
  misc_feature 1..21: note = Synthetic
  source 1..21: mol_type = other RNA
tctgccttttgcttccgcagc

SEQ ID NO: 6233 - RNA, 21 nt, synthetic construct
  misc_feature 1..21: note = Synthetic
  source 1..21: mol_type = other RNA
ctgccttttgcttccgcagct

SEQ ID NO: 6234 - RNA, 21 nt, synthetic construct
  misc_feature 1..21: note = Synthetic
  source 1..21: mol_type = other RNA
tgccttttgcttccgcagctc

SEQ ID NO: 6235 - RNA, 21 nt, synthetic construct
  misc_feature 1..21: note = Synthetic
  source 1..21: mol_type = other RNA
gccttttgcttccgcagctca

SEQ ID NO: 6236 - RNA, 21 nt, synthetic construct
  misc_feature 1..21: note = Synthetic
  source 1..21: mol_type = other RNA
ccttttgcttccgcagctcac

SEQ ID NO: 6237 - RNA, 21 nt, synthetic construct
  misc_feature 1..21: note = Synthetic
  source 1..21: mol_type = other RNA
cttttgcttccgcagctcact

SEQ ID NO: 6238 - RNA, 21 nt, synthetic construct
  misc_feature 1..21: note = Synthetic
  source 1..21: mol_type = other RNA
ttttgcttccgcagctcactc

SEQ ID NO: 6239 - RNA, 21 nt, synthetic construct
  misc_feature 1..21: note = Synthetic
  source 1..21: mol_type = other RNA
tttgcttccgcagctcactct

SEQ ID NO: 6240 - RNA, 21 nt, synthetic construct
  misc_feature 1..21: note = Synthetic
  source 1..21: mol_type = other RNA
ttgcttccgcagctcactctt

SEQ ID NO: 6241 - RNA, 21 nt, synthetic construct
  misc_feature 1..21: note = Synthetic
  source 1..21: mol_type = other RNA
tgcttccgcagctcactcttg

SEQ ID NO: 6242 - RNA, 21 nt, synthetic construct
  misc_feature 1..21: note = Synthetic
  source 1..21: mol_type = other RNA
gcttccgcagctcactcttga

SEQ ID NO: 6243 - RNA, 21 nt, synthetic construct
  misc_feature 1..21: note = Synthetic
  source 1..21: mol_type = other RNA
cttccgcagctcactcttgag

SEQ ID NO: 6244 - RNA, 21 nt, synthetic construct
  misc_feature 1..21: note = Synthetic
  source 1..21: mol_type = other RNA
ttccgcagctcactcttgagc

SEQ ID NO: 6245 - RNA, 21 nt, synthetic construct
  misc_feature 1..21: note = Synthetic
  source 1..21: mol_type = other RNA
tccgcagctcactcttgagca

SEQ ID NO: 6246 - RNA, 21 nt, synthetic construct
  misc_feature 1..21: note = Synthetic
  source 1..21: mol_type = other RNA
ccgcagctcactcttgagcat

SEQ ID NO: 6247 - RNA, 21 nt, synthetic construct
  misc_feature 1..21: note = Synthetic
  source 1..21: mol_type = other RNA
cgcagctcactcttgagcatc

SEQ ID NO: 6248 - RNA, 21 nt, synthetic construct
  misc_feature 1..21: note = Synthetic
  source 1..21: mol_type = other RNA
gcagctcactcttgagcatcg

SEQ ID NO: 6249 - RNA, 21 nt, synthetic construct
  misc_feature 1..21: note = Synthetic
  source 1..21: mol_type = other RNA
cagctcactcttgagcatcgc

SEQ ID NO: 6250 - RNA, 21 nt, synthetic construct
  misc_feature 1..21: note = Synthetic
  source 1..21: mol_type = other RNA
agctcactcttgagcatcgct

SEQ ID NO: 6251 - RNA, 21 nt, synthetic construct
  misc_feature 1..21: note = Synthetic
  source 1..21: mol_type = other RNA
gctcactcttgagcatcgctg

SEQ ID NO: 6252 - RNA, 21 nt, synthetic construct
  misc_feature 1..21: note = Synthetic
  source 1..21: mol_type = other RNA
ctcactcttgagcatcgctgc

SEQ ID NO: 6253 - RNA, 21 nt, synthetic construct
  misc_feature 1..21: note = Synthetic
  source 1..21: mol_type = other RNA
tcactcttgagcatcgctgcc

SEQ ID NO: 6254 - RNA, 21 nt, synthetic construct
  misc_feature 1..21: note = Synthetic
  source 1..21: mol_type = other RNA
cactcttgagcatcgctgcca

SEQ ID NO: 6255 - RNA, 21 nt, synthetic construct
  misc_feature 1..21: note = Synthetic
  source 1..21: mol_type = other RNA
actcttgagcatcgctgccac

SEQ ID NO: 6256 - RNA, 21 nt, synthetic construct
  misc_feature 1..21: note = Synthetic
  source 1..21: mol_type = other RNA
ctcttgagcatcgctgccacc

SEQ ID NO: 6257 - RNA, 21 nt, synthetic construct
  misc_feature 1..21: note = Synthetic
  source 1..21: mol_type = other RNA
tcttgagcatcgctgccacct

SEQ ID NO: 6258 - RNA, 21 nt, synthetic construct
  misc_feature 1..21: note = Synthetic
  source 1..21: mol_type = other RNA
cttgagcatcgctgccacctc

SEQ ID NO: 6259 - RNA, 21 nt, synthetic construct
  misc_feature 1..21: note = Synthetic
  source 1..21: mol_type = other RNA
ttgagcatcgctgccacctca

SEQ ID NO: 6260 - RNA, 21 nt, synthetic construct
  misc_feature 1..21: note = Synthetic
  source 1..21: mol_type = other RNA
tgagcatcgctgccacctcat

SEQ ID NO: 6261 - RNA, 21 nt, synthetic construct
  misc_feature 1..21: note = Synthetic
  source 1..21: mol_type = other RNA
gagcatcgctgccacctcatg

SEQ ID NO: 6262 - RNA, 21 nt, synthetic construct
  misc_feature 1..21: note = Synthetic
  source 1..21: mol_type = other RNA
agcatcgctgccacctcatgg

SEQ ID NO: 6263 - RNA, 21 nt, synthetic construct
  misc_feature 1..21: note = Synthetic
  source 1..21: mol_type = other RNA
gcatcgctgccacctcatggc

SEQ ID NO: 6264 - RNA, 21 nt, synthetic construct
  misc_feature 1..21: note = Synthetic
  source 1..21: mol_type = other RNA
catcgctgccacctcatggcc

SEQ ID NO: 6265 - RNA, 21 nt, synthetic construct
  misc_feature 1..21: note = Synthetic
  source 1..21: mol_type = other RNA
atcgctgccacctcatggcct

SEQ ID NO: 6266 - RNA, 21 nt, synthetic construct
  misc_feature 1..21: note = Synthetic
  source 1..21: mol_type = other RNA
tcgctgccacctcatggcctt

SEQ ID NO: 6267 - RNA, 21 nt, synthetic construct
  misc_feature 1..21: note = Synthetic
  source 1..21: mol_type = other RNA
cgctgccacctcatggccttt

SEQ ID NO: 6268 - RNA, 21 nt, synthetic construct
  misc_feature 1..21: note = Synthetic
  source 1..21: mol_type = other RNA
gctgccacctcatggcctttg

SEQ ID NO: 6269 - RNA, 21 nt, synthetic construct
  misc_feature 1..21: note = Synthetic
  source 1..21: mol_type = other RNA
ctgccacctcatggcctttga

SEQ ID NO: 6270 - RNA, 21 nt, synthetic construct
  misc_feature 1..21: note = Synthetic
  source 1..21: mol_type = other RNA
tgccacctcatggcctttgaa

SEQ ID NO: 6271 - RNA, 21 nt, synthetic construct
  misc_feature 1..21: note = Synthetic
  source 1..21: mol_type = other RNA
gccacctcatggcctttgaag

SEQ ID NO: 6272 - RNA, 21 nt, synthetic construct
  misc_feature 1..21: note = Synthetic
  source 1..21: mol_type = other RNA
ccacctcatggcctttgaaga

SEQ ID NO: 6273 - RNA, 21 nt, synthetic construct
  misc_feature 1..21: note = Synthetic
  source 1..21: mol_type = other RNA
cacctcatggcctttgaagat

SEQ ID NO: 6274 - RNA, 21 nt, synthetic construct
  misc_feature 1..21: note = Synthetic
  source 1..21: mol_type = other RNA
acctcatggcctttgaagatc

SEQ ID NO: 6275 - RNA, 21 nt, synthetic construct
  misc_feature 1..21: note = Synthetic
  source 1..21: mol_type = other RNA
cctcatggcctttgaagatct

SEQ ID NO: 6276 - RNA, 21 nt, synthetic construct
  misc_feature 1..21: note = Synthetic
  source 1..21: mol_type = other RNA
ctcatggcctttgaagatctg

SEQ ID NO: 6277 - RNA, 21 nt, synthetic construct
  misc_feature 1..21: note = Synthetic
  source 1..21: mol_type = other RNA
tcatggcctttgaagatctgg

SEQ ID NO: 6278 - RNA, 21 nt, synthetic construct
  misc_feature 1..21: note = Synthetic
  source 1..21: mol_type = other RNA
catggcctttgaagatctggt

SEQ ID NO: 6279 - RNA, 21 nt, synthetic construct
  misc_feature 1..21: note = Synthetic
  source 1..21: mol_type = other RNA
atggcctttgaagatctggtg

SEQ ID NO: 6280 - RNA, 21 nt, synthetic construct
  misc_feature 1..21: note = Synthetic
  source 1..21: mol_type = other RNA
tggcctttgaagatctggtgg

SEQ ID NO: 6281 - RNA, 21 nt, synthetic construct
  misc_feature 1..21: note = Synthetic
  source 1..21: mol_type = other RNA
ggcctttgaagatctggtggg

SEQ ID NO: 6282 - RNA, 21 nt, synthetic construct
  misc_feature 1..21: note = Synthetic
  source 1..21: mol_type = other RNA
gcctttgaagatctggtgggg

SEQ ID NO: 6283 - RNA, 21 nt, synthetic construct
  misc_feature 1..21: note = Synthetic
  source 1..21: mol_type = other RNA
cctttgaagatctggtgggga

SEQ ID NO: 6284 - RNA, 21 nt, synthetic construct
  misc_feature 1..21: note = Synthetic
  source 1..21: mol_type = other RNA
ctttgaagatctggtggggag

SEQ ID NO: 6285 - RNA, 21 nt, synthetic construct
  misc_feature 1..21: note = Synthetic
  source 1..21: mol_type = other RNA
tttgaagatctggtggggagg

SEQ ID NO: 6286 - RNA, 21 nt, synthetic construct
  misc_feature 1..21: note = Synthetic
  source 1..21: mol_type = other RNA
ttgaagatctggtggggaggc

SEQ ID NO: 6287 - RNA, 21 nt, synthetic construct
  misc_feature 1..21: note = Synthetic
  source 1..21: mol_type = other RNA
tgaagatctggtggggaggct

SEQ ID NO: 6288 - RNA, 21 nt, synthetic construct
  misc_feature 1..21: note = Synthetic
  source 1..21: mol_type = other RNA
gaagatctggtggggaggctc

SEQ ID NO: 6289 - RNA, 21 nt, synthetic construct
  misc_feature 1..21: note = Synthetic
  source 1..21: mol_type = other RNA
aagatctggtggggaggctcg

SEQ ID NO: 6290 - RNA, 21 nt, synthetic construct
  misc_feature 1..21: note = Synthetic
  source 1..21: mol_type = other RNA
agatctggtggggaggctcgt

SEQ ID NO: 6291 - RNA, 21 nt, synthetic construct
  misc_feature 1..21: note = Synthetic
  source 1..21: mol_type = other RNA
gatctggtggggaggctcgtt

SEQ ID NO: 6292 - RNA, 21 nt, synthetic construct
  misc_feature 1..21: note = Synthetic
  source 1..21: mol_type = other RNA
atctggtggggaggctcgttt

SEQ ID NO: 6293 - RNA, 21 nt, synthetic construct
  misc_feature 1..21: note = Synthetic
  source 1..21: mol_type = other RNA
tctggtggggaggctcgtttt

SEQ ID NO: 6294 - RNA, 21 nt, synthetic construct
  misc_feature 1..21: note = Synthetic
  source 1..21: mol_type = other RNA
ctggtggggaggctcgttttg

SEQ ID NO: 6295 - RNA, 21 nt, synthetic construct
  misc_feature 1..21: note = Synthetic
  source 1..21: mol_type = other RNA
tggtggggaggctcgttttga

SEQ ID NO: 6296 - RNA, 21 nt, synthetic construct
  misc_feature 1..21: note = Synthetic
  source 1..21: mol_type = other RNA
ggtggggaggctcgttttgaa

SEQ ID NO: 6297 - RNA, 21 nt, synthetic construct
  misc_feature 1..21: note = Synthetic
  source 1..21: mol_type = other RNA
gtggggaggctcgttttgaac

SEQ ID NO: 6298 - RNA, 21 nt, synthetic construct
  misc_feature 1..21: note = Synthetic
  source 1..21: mol_type = other RNA
tggggaggctcgttttgaaca

SEQ ID NO: 6299 - RNA, 21 nt, synthetic construct
  misc_feature 1..21: note = Synthetic
  source 1..21: mol_type = other RNA
ggggaggctcgttttgaacaa

SEQ ID NO: 6300 - RNA, 21 nt, synthetic construct
  misc_feature 1..21: note = Synthetic
  source 1..21: mol_type = other RNA
gggaggctcgttttgaacaaa

SEQ ID NO: 6301 - RNA, 21 nt, synthetic construct
  misc_feature 1..21: note = Synthetic
  source 1..21: mol_type = other RNA
ggaggctcgttttgaacaaaa

SEQ ID NO: 6302 - RNA, 21 nt, synthetic construct
  misc_feature 1..21: note = Synthetic
  source 1..21: mol_type = other RNA
gaggctcgttttgaacaaaaa

SEQ ID NO: 6303 - RNA, 21 nt, synthetic construct
  misc_feature 1..21: note = Synthetic
  source 1..21: mol_type = other RNA
aggctcgttttgaacaaaaaa

SEQ ID NO: 6304 - RNA, 21 nt, synthetic construct
  misc_feature 1..21: note = Synthetic
  source 1..21: mol_type = other RNA
ggctcgttttgaacaaaaaat

SEQ ID NO: 6305 - RNA, 21 nt, synthetic construct
  misc_feature 1..21: note = Synthetic
  source 1..21: mol_type = other RNA
gctcgttttgaacaaaaaata

SEQ ID NO: 6306 - RNA, 21 nt, synthetic construct
  misc_feature 1..21: note = Synthetic
  source 1..21: mol_type = other RNA
ctcgttttgaacaaaaaatac

SEQ ID NO: 6307 - RNA, 21 nt, synthetic construct
  misc_feature 1..21: note = Synthetic
  source 1..21: mol_type = other RNA
tcgttttgaacaaaaaatacc

SEQ ID NO: 6308 - RNA, 21 nt, synthetic construct
  misc_feature 1..21: note = Synthetic
  source 1..21: mol_type = other RNA
cgttttgaacaaaaaatacca

SEQ ID NO: 6309 - RNA, 21 nt, synthetic construct
  misc_feature 1..21: note = Synthetic
  source 1..21: mol_type = other RNA
gttttgaacaaaaaataccat

SEQ ID NO: 6310 - RNA, 21 nt, synthetic construct
  misc_feature 1..21: note = Synthetic
  source 1..21: mol_type = other RNA
ttttgaacaaaaaataccatt

SEQ ID NO: 6311 - RNA, 21 nt, synthetic construct
  misc_feature 1..21: note = Synthetic
  source 1..21: mol_type = other RNA
tttgaacaaaaaataccattt

SEQ ID NO: 6312 - RNA, 21 nt, synthetic construct
  misc_feature 1..21: note = Synthetic
  source 1..21: mol_type = other RNA
ttgaacaaaaaataccatttt

SEQ ID NO: 6313 - RNA, 21 nt, synthetic construct
  misc_feature 1..21: note = Synthetic
  source 1..21: mol_type = other RNA
tgaacaaaaaataccattttg

SEQ ID NO: 6314 - RNA, 21 nt, synthetic construct
  misc_feature 1..21: note = Synthetic
  source 1..21: mol_type = other RNA
gaacaaaaaataccattttgg

SEQ ID NO: 6315 - RNA, 21 nt, synthetic construct
  misc_feature 1..21: note = Synthetic
  source 1..21: mol_type = other RNA
aacaaaaaataccattttggt

SEQ ID NO: 6316 - RNA, 21 nt, synthetic construct
  misc_feature 1..21: note = Synthetic
  source 1..21: mol_type = other RNA
acaaaaaataccattttggtg

SEQ ID NO: 6317 - RNA, 21 nt, synthetic construct
  misc_feature 1..21: note = Synthetic
  source 1..21: mol_type = other RNA
caaaaaataccattttggtgc

SEQ ID NO: 6318 - RNA, 21 nt, synthetic construct
  misc_feature 1..21: note = Synthetic
  source 1..21: mol_type = other RNA
aaaaaataccattttggtgct

SEQ ID NO: 6319 - RNA, 21 nt, synthetic construct
  misc_feature 1..21: note = Synthetic
  source 1..21: mol_type = other RNA
aaaaataccattttggtgctc

SEQ ID NO: 6320 - RNA, 21 nt, synthetic construct
  misc_feature 1..21: note = Synthetic
  source 1..21: mol_type = other RNA
aaaataccattttggtgctct

SEQ ID NO: 6321 - RNA, 21 nt, synthetic construct
  misc_feature 1..21: note = Synthetic
  source 1..21: mol_type = other RNA
aaataccattttggtgctctg

SEQ ID NO: 6322 - RNA, 21 nt, synthetic construct
  misc_feature 1..21: note = Synthetic
  source 1..21: mol_type = other RNA
aataccattttggtgctctgc

SEQ ID NO: 6323 - RNA, 21 nt, synthetic construct
  misc_feature 1..21: note = Synthetic
  source 1..21: mol_type = other RNA
ataccattttggtgctctgct

SEQ ID NO: 6324 - RNA, 21 nt, synthetic construct
  misc_feature 1..21: note = Synthetic
  source 1..21: mol_type = other RNA
taccattttggtgctctgctc

SEQ ID NO: 6325 - RNA, 21 nt, synthetic construct
  misc_feature 1..21: note = Synthetic
  source 1..21: mol_type = other RNA
accattttggtgctctgctcc

SEQ ID NO: 6326 - RNA, 21 nt, synthetic construct
  misc_feature 1..21: note = Synthetic
  source 1..21: mol_type = other RNA
ccattttggtgctctgctccg

SEQ ID NO: 6327 - RNA, 21 nt, synthetic construct
  misc_feature 1..21: note = Synthetic
  source 1..21: mol_type = other RNA
cattttggtgctctgctccgt

SEQ ID NO: 6328 - RNA, 21 nt, synthetic construct
  misc_feature 1..21: note = Synthetic
  source 1..21: mol_type = other RNA
attttggtgctctgctccgtg

SEQ ID NO: 6329 - RNA, 21 nt, synthetic construct
  misc_feature 1..21: note = Synthetic
  source 1..21: mol_type = other RNA
ttttggtgctctgctccgtgt

SEQ ID NO: 6330 - RNA, 21 nt, synthetic construct
  misc_feature 1..21: note = Synthetic
  source 1..21: mol_type = other RNA
tttggtgctctgctccgtgta

SEQ ID NO: 6331 - RNA, 21 nt, synthetic construct
  misc_feature 1..21: note = Synthetic
  source 1..21: mol_type = other RNA
ttggtgctctgctccgtgtac

SEQ ID NO: 6332 - RNA, 21 nt, synthetic construct
  misc_feature 1..21: note = Synthetic
  source 1..21: mol_type = other RNA
tggtgctctgctccgtgtacg

SEQ ID NO: 6333 - RNA, 21 nt, synthetic construct
  misc_feature 1..21: note = Synthetic
  source 1..21: mol_type = other RNA
ggtgctctgctccgtgtacgg

SEQ ID NO: 6334 - RNA, 21 nt, synthetic construct
  misc_feature 1..21: note = Synthetic
  source 1..21: mol_type = other RNA
gtgctctgctccgtgtacggc

SEQ ID NO: 6335 - RNA, 21 nt, synthetic construct
  misc_feature 1..21: note = Synthetic
  source 1..21: mol_type = other RNA
tgctctgctccgtgtacggct

SEQ ID NO: 6336 - RNA, 21 nt, synthetic construct
  misc_feature 1..21: note = Synthetic
  source 1..21: mol_type = other RNA
gctctgctccgtgtacggctg

SEQ ID NO: 6337 - RNA, 21 nt, synthetic construct
  misc_feature 1..21: note = Synthetic
  source 1..21: mol_type = other RNA
ctctgctccgtgtacggctga

SEQ ID NO: 6338 - RNA, 21 nt, synthetic construct
  misc_feature 1..21: note = Synthetic
  source 1..21: mol_type = other RNA
tctgctccgtgtacggctgaa

SEQ ID NO: 6339 - RNA, 21 nt, synthetic construct
  misc_feature 1..21: note = Synthetic
  source 1..21: mol_type = other RNA
ctgctccgtgtacggctgaat

SEQ ID NO: 6340 - RNA, 21 nt, synthetic construct
  misc_feature 1..21: note = Synthetic
  source 1..21: mol_type = other RNA
tgctccgtgtacggctgaatc

SEQ ID NO: 6341 - RNA, 21 nt, synthetic construct
  misc_feature 1..21: note = Synthetic
  source 1..21: mol_type = other RNA
gctccgtgtacggctgaatct

SEQ ID NO: 6342 - RNA, 21 nt, synthetic construct
  misc_feature 1..21: note = Synthetic
  source 1..21: mol_type = other RNA
ctccgtgtacggctgaatctt

SEQ ID NO: 6343 - RNA, 21 nt, synthetic construct
  misc_feature 1..21: note = Synthetic
  source 1..21: mol_type = other RNA
tccgtgtacggctgaatcttt

SEQ ID NO: 6344 - RNA, 21 nt, synthetic construct
  misc_feature 1..21: note = Synthetic
  source 1..21: mol_type = other RNA
ccgtgtacggctgaatctttt

SEQ ID NO: 6345 - RNA, 21 nt, synthetic construct
  misc_feature 1..21: note = Synthetic
  source 1..21: mol_type = other RNA
cgtgtacggctgaatcttttg

SEQ ID NO: 6346 - RNA, 21 nt, synthetic construct
  misc_feature 1..21: note = Synthetic
  source 1..21: mol_type = other RNA
gtgtacggctgaatcttttgc

SEQ ID NO: 6347 - RNA, 21 nt, synthetic construct
  misc_feature 1..21: note = Synthetic
  source 1..21: mol_type = other RNA
tgtacggctgaatcttttgca

SEQ ID NO: 6348 - RNA, 21 nt, synthetic construct
  misc_feature 1..21: note = Synthetic
  source 1..21: mol_type = other RNA
gtacggctgaatcttttgcac

SEQ ID NO: 6349 - RNA, 21 nt, synthetic construct
  misc_feature 1..21: note = Synthetic
  source 1..21: mol_type = other RNA
tacggctgaatcttttgcaca

SEQ ID NO: 6350 - RNA, 21 nt, synthetic construct
  misc_feature 1..21: note = Synthetic
  source 1..21: mol_type = other RNA
acggctgaatcttttgcacaa

SEQ ID NO: 6351 - RNA, 21 nt, synthetic construct
  misc_feature 1..21: note = Synthetic
  source 1..21: mol_type = other RNA
cggctgaatcttttgcacaat

SEQ ID NO: 6352 - RNA, 21 nt, synthetic construct
  misc_feature 1..21: note = Synthetic
  source 1..21: mol_type = other RNA
ggctgaatcttttgcacaatg

SEQ ID NO: 6353 - RNA, 21 nt, synthetic construct
  misc_feature 1..21: note = Synthetic
  source 1..21: mol_type = other RNA
gctgaatcttttgcacaatga

SEQ ID NO: 6354 - RNA, 21 nt, synthetic construct
  misc_feature 1..21: note = Synthetic
  source 1..21: mol_type = other RNA
ctgaatcttttgcacaatgat

SEQ ID NO: 6355 - RNA, 21 nt, synthetic construct
  misc_feature 1..21: note = Synthetic
  source 1..21: mol_type = other RNA
tgaatcttttgcacaatgatg

SEQ ID NO: 6356 - RNA, 21 nt, synthetic construct
  misc_feature 1..21: note = Synthetic
  source 1..21: mol_type = other RNA
gaatcttttgcacaatgatgt

SEQ ID NO: 6357 - RNA, 21 nt, synthetic construct
  misc_feature 1..21: note = Synthetic
  source 1..21: mol_type = other RNA
aatcttttgcacaatgatgtc

SEQ ID NO: 6358 - RNA, 21 nt, synthetic construct
  misc_feature 1..21: note = Synthetic
  source 1..21: mol_type = other RNA
atcttttgcacaatgatgtcg

SEQ ID NO: 6359 - RNA, 21 nt, synthetic construct
  misc_feature 1..21: note = Synthetic
  source 1..21: mol_type = other RNA
tcttttgcacaatgatgtcgg

SEQ ID NO: 6360 - RNA, 21 nt, synthetic construct
  misc_feature 1..21: note = Synthetic
  source 1..21: mol_type = other RNA
cttttgcacaatgatgtcgga

SEQ ID NO: 6361 - RNA, 21 nt, synthetic construct
  misc_feature 1..21: note = Synthetic
  source 1..21: mol_type = other RNA
ttttgcacaatgatgtcggaa

SEQ ID NO: 6362 - RNA, 21 nt, synthetic construct
  misc_feature 1..21: note = Synthetic
  source 1..21: mol_type = other RNA
tttgcacaatgatgtcggaat

SEQ ID NO: 6363 - RNA, 21 nt, synthetic construct
  misc_feature 1..21: note = Synthetic
  source 1..21: mol_type = other RNA
ttgcacaatgatgtcggaatc

SEQ ID NO: 6364 - RNA, 21 nt, synthetic construct
  misc_feature 1..21: note = Synthetic
  source 1..21: mol_type = other RNA
tgcacaatgatgtcggaatcc

SEQ ID NO: 6365 - RNA, 21 nt, synthetic construct
  misc_feature 1..21: note = Synthetic
  source 1..21: mol_type = other RNA
gcacaatgatgtcggaatcca

SEQ ID NO: 6366 - RNA, 21 nt, synthetic construct
  misc_feature 1..21: note = Synthetic
  source 1..21: mol_type = other RNA
cacaatgatgtcggaatccag

SEQ ID NO: 6367 - RNA, 21 nt, synthetic construct
  misc_feature 1..21: note = Synthetic
  source 1..21: mol_type = other RNA
acaatgatgtcggaatccagc

SEQ ID NO: 6368 - RNA, 21 nt, synthetic construct
  misc_feature 1..21: note = Synthetic
  source 1..21: mol_type = other RNA
caatgatgtcggaatccagca

SEQ ID NO: 6369 - RNA, 21 nt, synthetic construct
  misc_feature 1..21: note = Synthetic
  source 1..21: mol_type = other RNA
aatgatgtcggaatccagcac

SEQ ID NO: 6370 - RNA, 21 nt, synthetic construct
  misc_feature 1..21: note = Synthetic
  source 1..21: mol_type = other RNA
atgatgtcggaatccagcacc

SEQ ID NO: 6371 - RNA, 21 nt, synthetic construct
  misc_feature 1..21: note = Synthetic
  source 1..21: mol_type = other RNA
tgatgtcggaatccagcaccc

SEQ ID NO: 6372 - RNA, 21 nt, synthetic construct
  misc_feature 1..21: note = Synthetic
  source 1..21: mol_type = other RNA
gatgtcggaatccagcacccc

SEQ ID NO: 6373 - RNA, 21 nt, synthetic construct
  misc_feature 1..21: note = Synthetic
  source 1..21: mol_type = other RNA
atgtcggaatccagcaccccc

SEQ ID NO: 6374 - RNA, 21 nt, synthetic construct
  misc_feature 1..21: note = Synthetic
  source 1..21: mol_type = other RNA
tgtcggaatccagcaccccca

SEQ ID NO: 6375 - RNA, 21 nt, synthetic construct
  misc_feature 1..21: note = Synthetic
  source 1..21: mol_type = other RNA
gtcggaatccagcacccccag

SEQ ID NO: 6376 - RNA, 21 nt, synthetic construct
  misc_feature 1..21: note = Synthetic
  source 1..21: mol_type = other RNA
tcggaatccagcacccccagg

SEQ ID NO: 6377 - RNA, 21 nt, synthetic construct
  misc_feature 1..21: note = Synthetic
  source 1..21: mol_type = other RNA
cggaatccagcacccccagga

SEQ ID NO: 6378 - RNA, 21 nt, synthetic construct
  misc_feature 1..21: note = Synthetic
  source 1..21: mol_type = other RNA
ggaatccagcacccccaggag

SEQ ID NO: 6379 - RNA, 21 nt, synthetic construct
  misc_feature 1..21: note = Synthetic
  source 1..21: mol_type = other RNA
gaatccagcacccccaggagg

SEQ ID NO: 6380 - RNA, 21 nt, synthetic construct
  misc_feature 1..21: note = Synthetic
  source 1..21: mol_type = other RNA
aatccagcacccccaggagga

SEQ ID NO: 6381 - RNA, 21 nt, synthetic construct
  misc_feature 1..21: note = Synthetic
  source 1..21: mol_type = other RNA
atccagcacccccaggaggac

SEQ ID NO: 6382 - RNA, 21 nt, synthetic construct
  misc_feature 1..21: note = Synthetic
  source 1..21: mol_type = other RNA
tccagcacccccaggaggacc

SEQ ID NO: 6383 - DNA, 21 bp, synthetic construct
  misc_feature 1..21: note = Synthetic
  source 1..21: mol_type = other DNA
ccagcacccccaggaggaccc

SEQ ID NO: 6384 - DNA, 21 bp, synthetic construct
  misc_feature 1..21: note = Synthetic
  source 1..21: mol_type = other DNA
cagcacccccaggaggacccc

SEQ ID NO: 6385 - DNA, 21 bp, synthetic construct
  misc_feature 1..21: note = Synthetic
  source 1..21: mol_type = other DNA
agcacccccaggaggacccca

SEQ ID NO: 6386 - DNA, 21 bp, synthetic construct
  misc_feature 1..21: note = Synthetic
  source 1..21: mol_type = other DNA
gcacccccaggaggaccccaa

SEQ ID NO: 6387 - RNA, 21 nt, synthetic construct
  misc_feature 1..21: note = Synthetic
  source 1..21: mol_type = other RNA
cacccccaggaggaccccaat

SEQ ID NO: 6388 - RNA, 21 nt, synthetic construct
  misc_feature 1..21: note = Synthetic
  source 1..21: mol_type = other RNA
acccccaggaggaccccaatc

SEQ ID NO: 6389 - RNA, 21 nt, synthetic construct
  misc_feature 1..21: note = Synthetic
  source 1..21: mol_type = other RNA
cccccaggaggaccccaatct

SEQ ID NO: 6390 - RNA, 21 nt, synthetic construct
  misc_feature 1..21: note = Synthetic
  source 1..21: mol_type = other RNA
ccccaggaggaccccaatctg

SEQ ID NO: 6391 - RNA, 21 nt, synthetic construct
  misc_feature 1..21: note = Synthetic
  source 1..21: mol_type = other RNA
cccaggaggaccccaatctgg

SEQ ID NO: 6392 - RNA, 21 nt, synthetic construct
  misc_feature 1..21: note = Synthetic
  source 1..21: mol_type = other RNA
ccaggaggaccccaatctggc

SEQ ID NO: 6393 - RNA, 21 nt, synthetic construct
  misc_feature 1..21: note = Synthetic
  source 1..21: mol_type = other RNA
caggaggaccccaatctggcg

SEQ ID NO: 6394 - RNA, 21 nt, synthetic construct
  misc_feature 1..21: note = Synthetic
  source 1..21: mol_type = other RNA
aggaggaccccaatctggcgg

SEQ ID NO: 6395 - RNA, 21 nt, synthetic construct
  misc_feature 1..21: note = Synthetic
  source 1..21: mol_type = other RNA
ggaggaccccaatctggcgga

SEQ ID NO: 6396 - RNA, 21 nt, synthetic construct
  misc_feature 1..21: note = Synthetic
  source 1..21: mol_type = other RNA
gaggaccccaatctggcggat

SEQ ID NO: 6397 - RNA, 21 nt, synthetic construct
  misc_feature 1..21: note = Synthetic
  source 1..21: mol_type = other RNA
aggaccccaatctggcggatg

SEQ ID NO: 6398 - RNA, 21 nt, synthetic construct
  misc_feature 1..21: note = Synthetic
  source 1..21: mol_type = other RNA
ggaccccaatctggcggatga

SEQ ID NO: 6399 - RNA, 21 nt, synthetic construct
  misc_feature 1..21: note = Synthetic
  source 1..21: mol_type = other RNA
gaccccaatctggcggatgaa

SEQ ID NO: 6400 - RNA, 21 nt, synthetic construct
  misc_feature 1..21: note = Synthetic
  source 1..21: mol_type = other RNA
accccaatctggcggatgaac

SEQ ID NO: 6401 - RNA, 21 nt, synthetic construct
  misc_feature 1..21: note = Synthetic
  source 1..21: mol_type = other RNA
ccccaatctggcggatgaaca

SEQ ID NO: 6402 - RNA, 21 nt, synthetic construct
  misc_feature 1..21: note = Synthetic
  source 1..21: mol_type = other RNA
cccaatctggcggatgaacat

SEQ ID NO: 6403 - RNA, 21 nt, synthetic construct
  misc_feature 1..21: note = Synthetic
  source 1..21: mol_type = other RNA
ccaatctggcggatgaacatc

SEQ ID NO: 6404 - RNA, 21 nt, synthetic construct
  misc_feature 1..21: note = Synthetic
  source 1..21: mol_type = other RNA
caatctggcggatgaacatcc

SEQ ID NO: 6405 - RNA, 21 nt, synthetic construct
  misc_feature 1..21: note = Synthetic
  source 1..21: mol_type = other RNA
aatctggcggatgaacatccc

SEQ ID NO: 6406 - RNA, 21 nt, synthetic construct
  misc_feature 1..21: note = Synthetic
  source 1..21: mol_type = other RNA
atctggcggatgaacatcccc

SEQ ID NO: 6407 - RNA, 21 nt, synthetic construct
  misc_feature 1..21: note = Synthetic
  source 1..21: mol_type = other RNA
tctggcggatgaacatcccct

SEQ ID NO: 6408 - RNA, 21 nt, synthetic construct
  misc_feature 1..21: note = Synthetic
  source 1..21: mol_type = other RNA
ctggcggatgaacatcccctt

SEQ ID NO: 6409 - RNA, 21 nt, synthetic construct
  misc_feature 1..21: note = Synthetic
  source 1..21: mol_type = other RNA
tggcggatgaacatccccttc

SEQ ID NO: 6410 - RNA, 21 nt, synthetic construct
  misc_feature 1..21: note = Synthetic
  source 1..21: mol_type = other RNA
ggcggatgaacatccccttca

SEQ ID NO: 6411 - RNA, 21 nt, synthetic construct
  misc_feature 1..21: note = Synthetic
  source 1..21: mol_type = other RNA
gcggatgaacatccccttcag

SEQ ID NO: 6412 - RNA, 21 nt, synthetic construct
  misc_feature 1..21: note = Synthetic
  source 1..21: mol_type = other RNA
cggatgaacatccccttcagc

SEQ ID NO: 6413 - RNA, 21 nt, synthetic construct
  misc_feature 1..21: note = Synthetic
  source 1..21: mol_type = other RNA
ggatgaacatccccttcagcc

SEQ ID NO: 6414 - RNA, 21 nt, synthetic construct
  misc_feature 1..21: note = Synthetic
  source 1..21: mol_type = other RNA
gatgaacatccccttcagcct

SEQ ID NO: 6415 - RNA, 21 nt, synthetic construct
  misc_feature 1..21: note = Synthetic
  source 1..21: mol_type = other RNA
atgaacatccccttcagcctc

SEQ ID NO: 6416 - RNA, 21 nt, synthetic construct
  misc_feature 1..21: note = Synthetic
  source 1..21: mol_type = other RNA
tgaacatccccttcagcctct

SEQ ID NO: 6417 - RNA, 21 nt, synthetic construct
  misc_feature 1..21: note = Synthetic
  source 1..21: mol_type = other RNA
gaacatccccttcagcctctc

SEQ ID NO: 6418 - RNA, 21 nt, synthetic construct
  misc_feature 1..21: note = Synthetic
  source 1..21: mol_type = other RNA
aacatccccttcagcctctca

SEQ ID NO: 6419 - RNA, 21 nt, synthetic construct
  misc_feature 1..21: note = Synthetic
  source 1..21: mol_type = other RNA
acatccccttcagcctctcag

SEQ ID NO: 6420 - RNA, 21 nt, synthetic construct
  misc_feature 1..21: note = Synthetic
  source 1..21: mol_type = other RNA
catccccttcagcctctcagt

SEQ ID NO: 6421 - RNA, 21 nt, synthetic construct
  misc_feature 1..21: note = Synthetic
  source 1..21: mol_type = other RNA
atccccttcagcctctcagtt

SEQ ID NO: 6422 - RNA, 21 nt, synthetic construct
  misc_feature 1..21: note = Synthetic
  source 1..21: mol_type = other RNA
tccccttcagcctctcagtta

SEQ ID NO: 6423 - RNA, 21 nt, synthetic construct
  misc_feature 1..21: note = Synthetic
  source 1..21: mol_type = other RNA
ccccttcagcctctcagttag

SEQ ID NO: 6424 - RNA, 21 nt, synthetic construct
  misc_feature 1..21: note = Synthetic
  source 1..21: mol_type = other RNA
cccttcagcctctcagttagc

SEQ ID NO: 6425 - RNA, 21 nt, synthetic construct
  misc_feature 1..21: note = Synthetic
  source 1..21: mol_type = other RNA
ccttcagcctctcagttagct

SEQ ID NO: 6426 - RNA, 21 nt, synthetic construct
  misc_feature 1..21: note = Synthetic
  source 1..21: mol_type = other RNA
cttcagcctctcagttagctg

SEQ ID NO: 6427 - RNA, 21 nt, synthetic construct
  misc_feature 1..21: note = Synthetic
  source 1..21: mol_type = other RNA
ttcagcctctcagttagctga

SEQ ID NO: 6428 - RNA, 21 nt, synthetic construct
  misc_feature 1..21: note = Synthetic
  source 1..21: mol_type = other RNA
tcagcctctcagttagctgac

SEQ ID NO: 6429 - RNA, 21 nt, synthetic construct
  misc_feature 1..21: note = Synthetic
  source 1..21: mol_type = other RNA
cagcctctcagttagctgact

SEQ ID NO: 6430 - RNA, 21 nt, synthetic construct
  misc_feature 1..21: note = Synthetic
  source 1..21: mol_type = other RNA
agcctctcagttagctgactg

SEQ ID NO: 6431 - RNA, 21 nt, synthetic construct
  misc_feature 1..21: note = Synthetic
  source 1..21: mol_type = other RNA
gcctctcagttagctgactga

SEQ ID NO: 6432 - RNA, 21 nt, synthetic construct
  misc_feature 1..21: note = Synthetic
  source 1..21: mol_type = other RNA
cctctcagttagctgactgac

SEQ ID NO: 6433 - RNA, 21 nt, synthetic construct
  misc_feature 1..21: note = Synthetic
  source 1..21: mol_type = other RNA
ctctcagttagctgactgacg

SEQ ID NO: 6434 - RNA, 21 nt, synthetic construct
  misc_feature 1..21: note = Synthetic
  source 1..21: mol_type = other RNA
tctcagttagctgactgacgt

SEQ ID NO: 6435 - RNA, 21 nt, synthetic construct
  misc_feature 1..21: note = Synthetic
  source 1..21: mol_type = other RNA
ctcagttagctgactgacgtt

SEQ ID NO: 6436 - RNA, 21 nt, synthetic construct
  misc_feature 1..21: note = Synthetic
  source 1..21: mol_type = other RNA
tcagttagctgactgacgttg

SEQ ID NO: 6437 - RNA, 21 nt, synthetic construct
  misc_feature 1..21: note = Synthetic
  source 1..21: mol_type = other RNA
cagttagctgactgacgttga

SEQ ID NO: 6438 - RNA, 21 nt, synthetic construct
  misc_feature 1..21: note = Synthetic
  source 1..21: mol_type = other RNA
agttagctgactgacgttgat

SEQ ID NO: 6439 - RNA, 21 nt, synthetic construct
  misc_feature 1..21: note = Synthetic
  source 1..21: mol_type = other RNA
gttagctgactgacgttgata

SEQ ID NO: 6440 - RNA, 21 nt, synthetic construct
  misc_feature 1..21: note = Synthetic
  source 1..21: mol_type = other RNA
ttagctgactgacgttgatat

SEQ ID NO: 6441 - RNA, 21 nt, synthetic construct
  misc_feature 1..21: note = Synthetic
  source 1..21: mol_type = other RNA
tagctgactgacgttgatatc

SEQ ID NO: 6442 - RNA, 21 nt, synthetic construct
  misc_feature 1..21: note = Synthetic
  source 1..21: mol_type = other RNA
agctgactgacgttgatatcc

SEQ ID NO: 6443 - RNA, 21 nt, synthetic construct
  misc_feature 1..21: note = Synthetic
  source 1..21: mol_type = other RNA
gctgactgacgttgatatcca

SEQ ID NO: 6444 - RNA, 21 nt, synthetic construct
  misc_feature 1..21: note = Synthetic
  source 1..21: mol_type = other RNA
ctgactgacgttgatatccaa

SEQ ID NO: 6445 - RNA, 21 nt, synthetic construct
  misc_feature 1..21: note = Synthetic
  source 1..21: mol_type = other RNA
tgactgacgttgatatccaag

SEQ ID NO: 6446 - RNA, 21 nt, synthetic construct
  misc_feature 1..21: note = Synthetic
  source 1..21: mol_type = other RNA
gactgacgttgatatccaaga

SEQ ID NO: 6447 - RNA, 21 nt, synthetic construct
  misc_feature 1..21: note = Synthetic
  source 1..21: mol_type = other RNA
actgacgttgatatccaagat

SEQ ID NO: 6448 - RNA, 21 nt, synthetic construct
  misc_feature 1..21: note = Synthetic
  source 1..21: mol_type = other RNA
ctgacgttgatatccaagatg

SEQ ID NO: 6449 - RNA, 21 nt, synthetic construct
  misc_feature 1..21: note = Synthetic
  source 1..21: mol_type = other RNA
tgacgttgatatccaagatga

SEQ ID NO: 6450 - RNA, 21 nt, synthetic construct
  misc_feature 1..21: note = Synthetic
  source 1..21: mol_type = other RNA
gacgttgatatccaagatgat

SEQ ID NO: 6451 - RNA, 21 nt, synthetic construct
  misc_feature 1..21: note = Synthetic
  source 1..21: mol_type = other RNA
acgttgatatccaagatgatc

SEQ ID NO: 6452 - RNA, 21 nt, synthetic construct
  misc_feature 1..21: note = Synthetic
  source 1..21: mol_type = other RNA
cgttgatatccaagatgatct

SEQ ID NO: 6453 - RNA, 21 nt, synthetic construct
  misc_feature 1..21: note = Synthetic
  source 1..21: mol_type = other RNA
gttgatatccaagatgatctc

SEQ ID NO: 6454 - RNA, 21 nt, synthetic construct
  misc_feature 1..21: note = Synthetic
  source 1..21: mol_type = other RNA
ttgatatccaagatgatctcc

SEQ ID NO: 6455 - RNA, 21 nt, synthetic construct
  misc_feature 1..21: note = Synthetic
  source 1..21: mol_type = other RNA
tgatatccaagatgatctcca

SEQ ID NO: 6456 - RNA, 21 nt, synthetic construct
  misc_feature 1..21: note = Synthetic
  source 1..21: mol_type = other RNA
gatatccaagatgatctccac

SEQ ID NO: 6457 - RNA, 21 nt, synthetic construct
  misc_feature 1..21: note = Synthetic
  source 1..21: mol_type = other RNA
atatccaagatgatctccacc

SEQ ID NO: 6458 - RNA, 21 nt, synthetic construct
  misc_feature 1..21: note = Synthetic
  source 1..21: mol_type = other RNA
tatccaagatgatctccacca

SEQ ID NO: 6459 - RNA, 21 nt, synthetic construct
  misc_feature 1..21: note = Synthetic
  source 1..21: mol_type = other RNA
atccaagatgatctccaccag

SEQ ID NO: 6460 - RNA, 21 nt, synthetic construct
  misc_feature 1..21: note = Synthetic
  source 1..21: mol_type = other RNA
tccaagatgatctccaccagg

SEQ ID NO: 6461 - RNA, 21 nt, synthetic construct
  misc_feature 1..21: note = Synthetic
  source 1..21: mol_type = other RNA
ccaagatgatctccaccaggt

SEQ ID NO: 6462 - RNA, 21 nt, synthetic construct
  misc_feature 1..21: note = Synthetic
  source 1..21: mol_type = other RNA
caagatgatctccaccaggtt

SEQ ID NO: 6463 - RNA, 21 nt, synthetic construct
  misc_feature 1..21: note = Synthetic
  source 1..21: mol_type = other RNA
aagatgatctccaccaggttg

SEQ ID NO: 6464 - RNA, 21 nt, synthetic construct
  misc_feature 1..21: note = Synthetic
  source 1..21: mol_type = other RNA
agatgatctccaccaggttgt

SEQ ID NO: 6465 - RNA, 21 nt, synthetic construct
  misc_feature 1..21: note = Synthetic
  source 1..21: mol_type = other RNA
gatgatctccaccaggttgtt

SEQ ID NO: 6466 - RNA, 21 nt, synthetic construct
  misc_feature 1..21: note = Synthetic
  source 1..21: mol_type = other RNA
atgatctccaccaggttgttt

SEQ ID NO: 6467 - RNA, 21 nt, synthetic construct
  misc_feature 1..21: note = Synthetic
  source 1..21: mol_type = other RNA
tgatctccaccaggttgtttt

SEQ ID NO: 6468 - RNA, 21 nt, synthetic construct
  misc_feature 1..21: note = Synthetic
  source 1..21: mol_type = other RNA
gatctccaccaggttgttttt

SEQ ID NO: 6469 - RNA, 21 nt, synthetic construct
  misc_feature 1..21: note = Synthetic
  source 1..21: mol_type = other RNA
atctccaccaggttgtttttc

SEQ ID NO: 6470 - RNA, 21 nt, synthetic construct
  misc_feature 1..21: note = Synthetic
  source 1..21: mol_type = other RNA
tctccaccaggttgtttttcc

SEQ ID NO: 6471 - RNA, 21 nt, synthetic construct
  misc_feature 1..21: note = Synthetic
  source 1..21: mol_type = other RNA
ctccaccaggttgtttttcct

SEQ ID NO: 6472 - RNA, 21 nt, synthetic construct
  misc_feature 1..21: note = Synthetic
  source 1..21: mol_type = other RNA
tccaccaggttgtttttcctg

SEQ ID NO: 6473 - RNA, 21 nt, synthetic construct
  misc_feature 1..21: note = Synthetic
  source 1..21: mol_type = other RNA
ccaccaggttgtttttcctgg

SEQ ID NO: 6474 - RNA, 21 nt, synthetic construct
  misc_feature 1..21: note = Synthetic
  source 1..21: mol_type = other RNA
caccaggttgtttttcctggg

SEQ ID NO: 6475 - RNA, 21 nt, synthetic construct
  misc_feature 1..21: note = Synthetic
  source 1..21: mol_type = other RNA
accaggttgtttttcctggga

SEQ ID NO: 6476 - RNA, 21 nt, synthetic construct
  misc_feature 1..21: note = Synthetic
  source 1..21: mol_type = other RNA
ccaggttgtttttcctgggat

SEQ ID NO: 6477 - RNA, 21 nt, synthetic construct
  misc_feature 1..21: note = Synthetic
  source 1..21: mol_type = other RNA
caggttgtttttcctgggatc

SEQ ID NO: 6478 - RNA, 21 nt, synthetic construct
  misc_feature 1..21: note = Synthetic
  source 1..21: mol_type = other RNA
aggttgtttttcctgggatca

SEQ ID NO: 6479 - RNA, 21 nt, synthetic construct
  misc_feature 1..21: note = Synthetic
  source 1..21: mol_type = other RNA
ggttgtttttcctgggatcag

SEQ ID NO: 6480 - RNA, 21 nt, synthetic construct
  misc_feature 1..21: note = Synthetic
  source 1..21: mol_type = other RNA
gttgtttttcctgggatcagg

SEQ ID NO: 6481 - RNA, 21 nt, synthetic construct
  misc_feature 1..21: note = Synthetic
  source 1..21: mol_type = other RNA
ttgtttttcctgggatcaggt

SEQ ID NO: 6482 - RNA, 21 nt, synthetic construct
  misc_feature 1..21: note = Synthetic
  source 1..21: mol_type = other RNA
tgtttttcctgggatcaggtt

SEQ ID NO: 6483 - RNA, 21 nt, synthetic construct
  misc_feature 1..21: note = Synthetic
  source 1..21: mol_type = other RNA
gtttttcctgggatcaggttt

SEQ ID NO: 6484 - RNA, 21 nt, synthetic construct
  misc_feature 1..21: note = Synthetic
  source 1..21: mol_type = other RNA
tttttcctgggatcaggtttc

SEQ ID NO: 6485 - RNA, 21 nt, synthetic construct
  misc_feature 1..21: note = Synthetic
  source 1..21: mol_type = other RNA
ttttcctgggatcaggtttca

SEQ ID NO: 6486 - RNA, 21 nt, synthetic construct
  misc_feature 1..21: note = Synthetic
  source 1..21: mol_type = other RNA
tttcctgggatcaggtttcac

SEQ ID NO: 6487 - RNA, 21 nt, synthetic construct
  misc_feature 1..21: note = Synthetic
  source 1..21: mol_type = other RNA
ttcctgggatcaggtttcacc

SEQ ID NO: 6488 - RNA, 21 nt, synthetic construct
  misc_feature 1..21: note = Synthetic
  source 1..21: mol_type = other RNA
tcctgggatcaggtttcacct

SEQ ID NO: 6489 - RNA, 21 nt, synthetic construct
  misc_feature 1..21: note = Synthetic
  source 1..21: mol_type = other RNA
cctgggatcaggtttcacctc

SEQ ID NO: 6490 - RNA, 21 nt, synthetic construct
  misc_feature 1..21: note = Synthetic
  source 1..21: mol_type = other RNA
ctgggatcaggtttcacctcc

SEQ ID NO: 6491 - RNA, 21 nt, synthetic construct
  misc_feature 1..21: note = Synthetic
  source 1..21: mol_type = other RNA
tgggatcaggtttcacctcca

SEQ ID NO: 6492 - RNA, 21 nt, synthetic construct
  misc_feature 1..21: note = Synthetic
  source 1..21: mol_type = other RNA
gggatcaggtttcacctccac

SEQ ID NO: 6493 - RNA, 21 nt, synthetic construct
  misc_feature 1..21: note = Synthetic
  source 1..21: mol_type = other RNA
ggatcaggtttcacctccaca

SEQ ID NO: 6494 - RNA, 21 nt, synthetic construct
  misc_feature 1..21: note = Synthetic
  source 1..21: mol_type = other RNA
gatcaggtttcacctccacag

SEQ ID NO: 6495 - RNA, 21 nt, synthetic construct
  misc_feature 1..21: note = Synthetic
  source 1..21: mol_type = other RNA
atcaggtttcacctccacagt

SEQ ID NO: 6496 - RNA, 21 nt, synthetic construct
  misc_feature 1..21: note = Synthetic
  source 1..21: mol_type = other RNA
tcaggtttcacctccacagtg

SEQ ID NO: 6497 - RNA, 21 nt, synthetic construct
  misc_feature 1..21: note = Synthetic
  source 1..21: mol_type = other RNA
caggtttcacctccacagtgg

SEQ ID NO: 6498 - RNA, 21 nt, synthetic construct
  misc_feature 1..21: note = Synthetic
  source 1..21: mol_type = other RNA
aggtttcacctccacagtggt

SEQ ID NO: 6499 - RNA, 21 nt, synthetic construct
  misc_feature 1..21: note = Synthetic
  source 1..21: mol_type = other RNA
ggtttcacctccacagtggtc

SEQ ID NO: 6500 - RNA, 21 nt, synthetic construct
  misc_feature 1..21: note = Synthetic
  source 1..21: mol_type = other RNA
gtttcacctccacagtggtcc

SEQ ID NO: 6501 - RNA, 21 nt, synthetic construct
  misc_feature 1..21: note = Synthetic
  source 1..21: mol_type = other RNA
tttcacctccacagtggtccg

SEQ ID NO: 6502 - RNA, 21 nt, synthetic construct
  misc_feature 1..21: note = Synthetic
  source 1..21: mol_type = other RNA
ttcacctccacagtggtccgg

SEQ ID NO: 6503 - RNA, 21 nt, synthetic construct
  misc_feature 1..21: note = Synthetic
  source 1..21: mol_type = other RNA
tcacctccacagtggtccggt

SEQ ID NO: 6504 - RNA, 21 nt, synthetic construct
  misc_feature 1..21: note = Synthetic
  source 1..21: mol_type = other RNA
cacctccacagtggtccggtc

SEQ ID NO: 6505 - RNA, 21 nt, synthetic construct
  misc_feature 1..21: note = Synthetic
  source 1..21: mol_type = other RNA
acctccacagtggtccggtct

SEQ ID NO: 6506 - RNA, 21 nt, synthetic construct
  misc_feature 1..21: note = Synthetic
  source 1..21: mol_type = other RNA
cctccacagtggtccggtctg

SEQ ID NO: 6507 - RNA, 21 nt, synthetic construct
  misc_feature 1..21: note = Synthetic
  source 1..21: mol_type = other RNA
ctccacagtggtccggtctgt

SEQ ID NO: 6508 - RNA, 21 nt, synthetic construct
  misc_feature 1..21: note = Synthetic
  source 1..21: mol_type = other RNA
tccacagtggtccggtctgtg

SEQ ID NO: 6509 - RNA, 21 nt, synthetic construct
  misc_feature 1..21: note = Synthetic
  source 1..21: mol_type = other RNA
ccacagtggtccggtctgtgt

SEQ ID NO: 6510 - RNA, 21 nt, synthetic construct
  misc_feature 1..21: note = Synthetic
  source 1..21: mol_type = other RNA
cacagtggtccggtctgtgtc

SEQ ID NO: 6511 - RNA, 21 nt, synthetic construct
  misc_feature 1..21: note = Synthetic
  source 1..21: mol_type = other RNA
acagtggtccggtctgtgtca

SEQ ID NO: 6512 - RNA, 21 nt, synthetic construct
  misc_feature 1..21: note = Synthetic
  source 1..21: mol_type = other RNA
cagtggtccggtctgtgtcac

SEQ ID NO: 6513 - RNA, 21 nt, synthetic construct
  misc_feature 1..21: note = Synthetic
  source 1..21: mol_type = other RNA
agtggtccggtctgtgtcact

SEQ ID NO: 6514 - RNA, 21 nt, synthetic construct
  misc_feature 1..21: note = Synthetic
  source 1..21: mol_type = other RNA
gtggtccggtctgtgtcactc

SEQ ID NO: 6515 - RNA, 21 nt, synthetic construct
  misc_feature 1..21: note = Synthetic
  source 1..21: mol_type = other RNA
tggtccggtctgtgtcactct

SEQ ID NO: 6516 - RNA, 21 nt, synthetic construct
  misc_feature 1..21: note = Synthetic
  source 1..21: mol_type = other RNA
ggtccggtctgtgtcactctc

SEQ ID NO: 6517 - RNA, 21 nt, synthetic construct
  misc_feature 1..21: note = Synthetic
  source 1..21: mol_type = other RNA
gtccggtctgtgtcactctca

SEQ ID NO: 6518 - RNA, 21 nt, synthetic construct
  misc_feature 1..21: note = Synthetic
  source 1..21: mol_type = other RNA
tccggtctgtgtcactctcac

SEQ ID NO: 6519 - RNA, 21 nt, synthetic construct
  misc_feature 1..21: note = Synthetic
  source 1..21: mol_type = other RNA
ccggtctgtgtcactctcacc

SEQ ID NO: 6520 - RNA, 21 nt, synthetic construct
  misc_feature 1..21: note = Synthetic
  source 1..21: mol_type = other RNA
cggtctgtgtcactctcaccc

SEQ ID NO: 6521 - RNA, 21 nt, synthetic construct
  misc_feature 1..21: note = Synthetic
  source 1..21: mol_type = other RNA
ggtctgtgtcactctcaccct

SEQ ID NO: 6522 - RNA, 21 nt, synthetic construct
  misc_feature 1..21: note = Synthetic
  source 1..21: mol_type = other RNA
gtctgtgtcactctcaccctt

SEQ ID NO: 6523 - RNA, 21 nt, synthetic construct
  misc_feature 1..21: note = Synthetic
  source 1..21: mol_type = other RNA
tctgtgtcactctcacccttt

SEQ ID NO: 6524 - RNA, 21 nt, synthetic construct
  misc_feature 1..21: note = Synthetic
  source 1..21: mol_type = other RNA
ctgtgtcactctcaccctttg

SEQ ID NO: 6525 - RNA, 21 nt, synthetic construct
  misc_feature 1..21: note = Synthetic
  source 1..21: mol_type = other RNA
tgtgtcactctcaccctttgc

SEQ ID NO: 6526 - RNA, 21 nt, synthetic construct
  misc_feature 1..21: note = Synthetic
  source 1..21: mol_type = other RNA
gtgtcactctcaccctttgca

SEQ ID NO: 6527 - RNA, 21 nt, synthetic construct
  misc_feature 1..21: note = Synthetic
  source 1..21: mol_type = other RNA
tgtcactctcaccctttgcat

SEQ ID NO: 6528 - RNA, 21 nt, synthetic construct
  misc_feature 1..21: note = Synthetic
  source 1..21: mol_type = other RNA
gtcactctcaccctttgcatc

SEQ ID NO: 6529 - RNA, 21 nt, synthetic construct
  misc_feature 1..21: note = Synthetic
  source 1..21: mol_type = other RNA
tcactctcaccctttgcatcg

SEQ ID NO: 6530 - RNA, 21 nt, synthetic construct
  misc_feature 1..21: note = Synthetic
  source 1..21: mol_type = other RNA
cactctcaccctttgcatcgg

SEQ ID NO: 6531 - RNA, 21 nt, synthetic construct
  misc_feature 1..21: note = Synthetic
  source 1..21: mol_type = other RNA
actctcaccctttgcatcggt

SEQ ID NO: 6532 - RNA, 21 nt, synthetic construct
  misc_feature 1..21: note = Synthetic
  source 1..21: mol_type = other RNA
ctctcaccctttgcatcggtc

SEQ ID NO: 6533 - RNA, 21 nt, synthetic construct
  misc_feature 1..21: note = Synthetic
  source 1..21: mol_type = other RNA
tctcaccctttgcatcggtca

SEQ ID NO: 6534 - RNA, 21 nt, synthetic construct
  misc_feature 1..21: note = Synthetic
  source 1..21: mol_type = other RNA
ctcaccctttgcatcggtcac

SEQ ID NO: 6535 - RNA, 21 nt, synthetic construct
  misc_feature 1..21: note = Synthetic
  source 1..21: mol_type = other RNA
tcaccctttgcatcggtcact

SEQ ID NO: 6536 - RNA, 21 nt, synthetic construct
  misc_feature 1..21: note = Synthetic
  source 1..21: mol_type = other RNA
caccctttgcatcggtcactt

SEQ ID NO: 6537 - RNA, 21 nt, synthetic construct
  misc_feature 1..21: note = Synthetic
  source 1..21: mol_type = other RNA
accctttgcatcggtcacttt

SEQ ID NO: 6538 - RNA, 21 nt, synthetic construct
  misc_feature 1..21: note = Synthetic
  source 1..21: mol_type = other RNA
ccctttgcatcggtcactttc

SEQ ID NO: 6539 - RNA, 21 nt, synthetic construct
  misc_feature 1..21: note = Synthetic
  source 1..21: mol_type = other RNA
cctttgcatcggtcactttca

SEQ ID NO: 6540 - RNA, 21 nt, synthetic construct
  misc_feature 1..21: note = Synthetic
  source 1..21: mol_type = other RNA
ctttgcatcggtcactttcag

SEQ ID NO: 6541 - RNA, 21 nt, synthetic construct
  misc_feature 1..21: note = Synthetic
  source 1..21: mol_type = other RNA
tttgcatcggtcactttcagg

SEQ ID NO: 6542 - RNA, 21 nt, synthetic construct
  misc_feature 1..21: note = Synthetic
  source 1..21: mol_type = other RNA
ttgcatcggtcactttcaggt

SEQ ID NO: 6543 - RNA, 21 nt, synthetic construct
  misc_feature 1..21: note = Synthetic
  source 1..21: mol_type = other RNA
tgcatcggtcactttcaggtg

SEQ ID NO: 6544 - RNA, 21 nt, synthetic construct
  misc_feature 1..21: note = Synthetic
  source 1..21: mol_type = other RNA
gcatcggtcactttcaggtga

SEQ ID NO: 6545 - RNA, 21 nt, synthetic construct
  misc_feature 1..21: note = Synthetic
  source 1..21: mol_type = other RNA
catcggtcactttcaggtgaa

SEQ ID NO: 6546 - RNA, 21 nt, synthetic construct
  misc_feature 1..21: note = Synthetic
  source 1..21: mol_type = other RNA
atcggtcactttcaggtgaaa

SEQ ID NO: 6547 - RNA, 21 nt, synthetic construct
  misc_feature 1..21: note = Synthetic
  source 1..21: mol_type = other RNA
tcggtcactttcaggtgaaaa

SEQ ID NO: 6548 - RNA, 21 nt, synthetic construct
  misc_feature 1..21: note = Synthetic
  source 1..21: mol_type = other RNA
cggtcactttcaggtgaaaag

SEQ ID NO: 6549 - RNA, 21 nt, synthetic construct
  misc_feature 1..21: note = Synthetic
  source 1..21: mol_type = other RNA
ggtcactttcaggtgaaaagt

SEQ ID NO: 6550 - RNA, 21 nt, synthetic construct
  misc_feature 1..21: note = Synthetic
  source 1..21: mol_type = other RNA
gtcactttcaggtgaaaagtg

SEQ ID NO: 6551 - RNA, 21 nt, synthetic construct
  misc_feature 1..21: note = Synthetic
  source 1..21: mol_type = other RNA
tcactttcaggtgaaaagtgt

SEQ ID NO: 6552 - RNA, 21 nt, synthetic construct
  misc_feature 1..21: note = Synthetic
  source 1..21: mol_type = other RNA
cactttcaggtgaaaagtgta

SEQ ID NO: 6553 - RNA, 21 nt, synthetic construct
  misc_feature 1..21: note = Synthetic
  source 1..21: mol_type = other RNA
actttcaggtgaaaagtgtag

SEQ ID NO: 6554 - RNA, 21 nt, synthetic construct
  misc_feature 1..21: note = Synthetic
  source 1..21: mol_type = other RNA
ctttcaggtgaaaagtgtagg

SEQ ID NO: 6555 - RNA, 21 nt, synthetic construct
  misc_feature 1..21: note = Synthetic
  source 1..21: mol_type = other RNA
tttcaggtgaaaagtgtaggt

SEQ ID NO: 6556 - RNA, 21 nt, synthetic construct
  misc_feature 1..21: note = Synthetic
  source 1..21: mol_type = other RNA
ttcaggtgaaaagtgtaggtt

SEQ ID NO: 6557 - RNA, 21 nt, synthetic construct
  misc_feature 1..21: note = Synthetic
  source 1..21: mol_type = other RNA
tcaggtgaaaagtgtaggttc

SEQ ID NO: 6558 - RNA, 21 nt, synthetic construct
  misc_feature 1..21: note = Synthetic
  source 1..21: mol_type = other RNA
caggtgaaaagtgtaggttcc

SEQ ID NO: 6559 - RNA, 21 nt, synthetic construct
  misc_feature 1..21: note = Synthetic
  source 1..21: mol_type = other RNA
aggtgaaaagtgtaggttccc

SEQ ID NO: 6560 - RNA, 21 nt, synthetic construct
  misc_feature 1..21: note = Synthetic
  source 1..21: mol_type = other RNA
ggtgaaaagtgtaggttccct

SEQ ID NO: 6561 - RNA, 21 nt, synthetic construct
  misc_feature 1..21: note = Synthetic
  source 1..21: mol_type = other RNA
gtgaaaagtgtaggttccctc

SEQ ID NO: 6562 - RNA, 21 nt, synthetic construct
  misc_feature 1..21: note = Synthetic
  source 1..21: mol_type = other RNA
tgaaaagtgtaggttccctca

SEQ ID NO: 6563 - RNA, 21 nt, synthetic construct
  misc_feature 1..21: note = Synthetic
  source 1..21: mol_type = other RNA
gaaaagtgtaggttccctcaa

SEQ ID NO: 6564 - RNA, 21 nt, synthetic construct
  misc_feature 1..21: note = Synthetic
  source 1..21: mol_type = other RNA
aaaagtgtaggttccctcaac

SEQ ID NO: 6565 - RNA, 21 nt, synthetic construct
  misc_feature 1..21: note = Synthetic
  source 1..21: mol_type = other RNA
aaagtgtaggttccctcaacc

SEQ ID NO: 6566 - RNA, 21 nt, synthetic construct
  misc_feature 1..21: note = Synthetic
  source 1..21: mol_type = other RNA
aagtgtaggttccctcaacca

SEQ ID NO: 6567 - RNA, 21 nt, synthetic construct
  misc_feature 1..21: note = Synthetic
  source 1..21: mol_type = other RNA
agtgtaggttccctcaaccag

SEQ ID NO: 6568 - RNA, 21 nt, synthetic construct
  misc_feature 1..21: note = Synthetic
  source 1..21: mol_type = other RNA
gtgtaggttccctcaaccagg

SEQ ID NO: 6569 - RNA, 21 nt, synthetic construct
  misc_feature 1..21: note = Synthetic
  source 1..21: mol_type = other RNA
tgtaggttccctcaaccaggt

SEQ ID NO: 6570 - RNA, 21 nt, synthetic construct
  misc_feature 1..21: note = Synthetic
  source 1..21: mol_type = other RNA
gtaggttccctcaaccaggtt

SEQ ID NO: 6571 - RNA, 21 nt, synthetic construct
  misc_feature 1..21: note = Synthetic
  source 1..21: mol_type = other RNA
taggttccctcaaccaggttt

SEQ ID NO: 6572 - RNA, 21 nt, synthetic construct
  misc_feature 1..21: note = Synthetic
  source 1..21: mol_type = other RNA
aggttccctcaaccaggtttg

SEQ ID NO: 6573 - RNA, 21 nt, synthetic construct
  misc_feature 1..21: note = Synthetic
  source 1..21: mol_type = other RNA
ggttccctcaaccaggtttga

SEQ ID NO: 6574 - RNA, 21 nt, synthetic construct
  misc_feature 1..21: note = Synthetic
  source 1..21: mol_type = other RNA
gttccctcaaccaggtttgaa

SEQ ID NO: 6575 - RNA, 21 nt, synthetic construct
  misc_feature 1..21: note = Synthetic
  source 1..21: mol_type = other RNA
ttccctcaaccaggtttgaaa

SEQ ID NO: 6576 - RNA, 21 nt, synthetic construct
  misc_feature 1..21: note = Synthetic
  source 1..21: mol_type = other RNA
tccctcaaccaggtttgaaag

SEQ ID NO: 6577 - RNA, 21 nt, synthetic construct
  misc_feature 1..21: note = Synthetic
  source 1..21: mol_type = other RNA
ccctcaaccaggtttgaaaga

SEQ ID NO: 6578 - RNA, 21 nt, synthetic construct
  misc_feature 1..21: note = Synthetic
  source 1..21: mol_type = other RNA
cctcaaccaggtttgaaagaa

SEQ ID NO: 6579 - RNA, 21 nt, synthetic construct
  misc_feature 1..21: note = Synthetic
  source 1..21: mol_type = other RNA
ctcaaccaggtttgaaagaaa

SEQ ID NO: 6580 - RNA, 21 nt, synthetic construct
  misc_feature 1..21: note = Synthetic
  source 1..21: mol_type = other RNA
tcaaccaggtttgaaagaaaa

SEQ ID NO: 6581 - RNA, 21 nt, synthetic construct
  misc_feature 1..21: note = Synthetic
  source 1..21: mol_type = other RNA
caaccaggtttgaaagaaaaa

SEQ ID NO: 6582 - RNA, 21 nt, synthetic construct
  misc_feature 1..21: note = Synthetic
  source 1..21: mol_type = other RNA
aaccaggtttgaaagaaaaag

SEQ ID NO: 6583 - RNA, 21 nt, synthetic construct
  misc_feature 1..21: note = Synthetic
  source 1..21: mol_type = other RNA
accaggtttgaaagaaaaagg

SEQ ID NO: 6584 - RNA, 21 nt, synthetic construct
  misc_feature 1..21: note = Synthetic
  source 1..21: mol_type = other RNA
ccaggtttgaaagaaaaagga

SEQ ID NO: 6585 - RNA, 21 nt, synthetic construct
  misc_feature 1..21: note = Synthetic
  source 1..21: mol_type = other RNA
caggtttgaaagaaaaaggat

SEQ ID NO: 6586 - RNA, 21 nt, synthetic construct
  misc_feature 1..21: note = Synthetic
  source 1..21: mol_type = other RNA
aggtttgaaagaaaaaggata

SEQ ID NO: 6587 - RNA, 21 nt, synthetic construct
  misc_feature 1..21: note = Synthetic
  source 1..21: mol_type = other RNA
ggtttgaaagaaaaaggatag

SEQ ID NO: 6588 - RNA, 21 nt, synthetic construct
  misc_feature 1..21: note = Synthetic
  source 1..21: mol_type = other RNA
gtttgaaagaaaaaggatagg

SEQ ID NO: 6589 - RNA, 21 nt, synthetic construct
  misc_feature 1..21: note = Synthetic
  source 1..21: mol_type = other RNA
tttgaaagaaaaaggataggg

SEQ ID NO: 6590 - RNA, 21 nt, synthetic construct
  misc_feature 1..21: note = Synthetic
  source 1..21: mol_type = other RNA
ttgaaagaaaaaggatagggt

SEQ ID NO: 6591 - RNA, 21 nt, synthetic construct
  misc_feature 1..21: note = Synthetic
  source 1..21: mol_type = other RNA
tgaaagaaaaaggatagggtg

SEQ ID NO: 6592 - RNA, 21 nt, synthetic construct
  misc_feature 1..21: note = Synthetic
  source 1..21: mol_type = other RNA
gaaagaaaaaggatagggtga

SEQ ID NO: 6593 - RNA, 21 nt, synthetic construct
  misc_feature 1..21: note = Synthetic
  source 1..21: mol_type = other RNA
aaagaaaaaggatagggtgat

SEQ ID NO: 6594 - RNA, 21 nt, synthetic construct
  misc_feature 1..21: note = Synthetic
  source 1..21: mol_type = other RNA
aagaaaaaggatagggtgatg

SEQ ID NO: 6595 - RNA, 21 nt, synthetic construct
  misc_feature 1..21: note = Synthetic
  source 1..21: mol_type = other RNA
agaaaaaggatagggtgatgg

SEQ ID NO: 6596 - RNA, 21 nt, synthetic construct
  misc_feature 1..21: note = Synthetic
  source 1..21: mol_type = other RNA
gaaaaaggatagggtgatggt

SEQ ID NO: 6597 - RNA, 21 nt, synthetic construct
  misc_feature 1..21: note = Synthetic
  source 1..21: mol_type = other RNA
aaaaaggatagggtgatggtc

SEQ ID NO: 6598 - RNA, 21 nt, synthetic construct
  misc_feature 1..21: note = Synthetic
  source 1..21: mol_type = other RNA
aaaaggatagggtgatggtca

SEQ ID NO: 6599 - RNA, 21 nt, synthetic construct
  misc_feature 1..21: note = Synthetic
  source 1..21: mol_type = other RNA
aaaggatagggtgatggtcag

SEQ ID NO: 6600 - RNA, 21 nt, synthetic construct
  misc_feature 1..21: note = Synthetic
  source 1..21: mol_type = other RNA
aaggatagggtgatggtcaga

SEQ ID NO: 6601 - RNA, 21 nt, synthetic construct
  misc_feature 1..21: note = Synthetic
  source 1..21: mol_type = other RNA
aggatagggtgatggtcagag

SEQ ID NO: 6602 - RNA, 21 nt, synthetic construct
  misc_feature 1..21: note = Synthetic
  source 1..21: mol_type = other RNA
ggatagggtgatggtcagagt

SEQ ID NO: 6603 - RNA, 21 nt, synthetic construct
  misc_feature 1..21: note = Synthetic
  source 1..21: mol_type = other RNA
gatagggtgatggtcagagtg

SEQ ID NO: 6604 - RNA, 21 nt, synthetic construct
  misc_feature 1..21: note = Synthetic
  source 1..21: mol_type = other RNA
atagggtgatggtcagagtga

SEQ ID NO: 6605 - RNA, 21 nt, synthetic construct
  misc_feature 1..21: note = Synthetic
  source 1..21: mol_type = other RNA
tagggtgatggtcagagtgat

SEQ ID NO: 6606 - RNA, 21 nt, synthetic construct
  misc_feature 1..21: note = Synthetic
  source 1..21: mol_type = other RNA
agggtgatggtcagagtgatt

SEQ ID NO: 6607 - RNA, 21 nt, synthetic construct
  misc_feature 1..21: note = Synthetic
  source 1..21: mol_type = other RNA
gggtgatggtcagagtgattt

SEQ ID NO: 6608 - RNA, 21 nt, synthetic construct
  misc_feature 1..21: note = Synthetic
  source 1..21: mol_type = other RNA
ggtgatggtcagagtgattta

SEQ ID NO: 6609 - RNA, 21 nt, synthetic construct
  misc_feature 1..21: note = Synthetic
  source 1..21: mol_type = other RNA
gtgatggtcagagtgatttaa

SEQ ID NO: 6610 - RNA, 21 nt, synthetic construct
  misc_feature 1..21: note = Synthetic
  source 1..21: mol_type = other RNA
tgatggtcagagtgatttaac

SEQ ID NO: 6611 - RNA, 21 nt, synthetic construct
  misc_feature 1..21: note = Synthetic
  source 1..21: mol_type = other RNA
gatggtcagagtgatttaaca

SEQ ID NO: 6612 - RNA, 21 nt, synthetic construct
  misc_feature 1..21: note = Synthetic
  source 1..21: mol_type = other RNA
atggtcagagtgatttaacac

SEQ ID NO: 6613 - RNA, 21 nt, synthetic construct
  misc_feature 1..21: note = Synthetic
  source 1..21: mol_type = other RNA
tggtcagagtgatttaacacc

SEQ ID NO: 6614 - RNA, 21 nt, synthetic construct
  misc_feature 1..21: note = Synthetic
  source 1..21: mol_type = other RNA
ggtcagagtgatttaacacct

SEQ ID NO: 6615 - RNA, 21 nt, synthetic construct
  misc_feature 1..21: note = Synthetic
  source 1..21: mol_type = other RNA
gtcagagtgatttaacacctc

SEQ ID NO: 6616 - RNA, 21 nt, synthetic construct
  misc_feature 1..21: note = Synthetic
  source 1..21: mol_type = other RNA
tcagagtgatttaacacctcc

SEQ ID NO: 6617 - RNA, 21 nt, synthetic construct
  misc_feature 1..21: note = Synthetic
  source 1..21: mol_type = other RNA
cagagtgatttaacacctccc

SEQ ID NO: 6618 - RNA, 21 nt, synthetic construct
  misc_feature 1..21: note = Synthetic
  source 1..21: mol_type = other RNA
agagtgatttaacacctcccc

SEQ ID NO: 6619 - RNA, 21 nt, synthetic construct
  misc_feature 1..21: note = Synthetic
  source 1..21: mol_type = other RNA
gagtgatttaacacctcccct

SEQ ID NO: 6620 - RNA, 21 nt, synthetic construct
  misc_feature 1..21: note = Synthetic
  source 1..21: mol_type = other RNA
agtgatttaacacctcccctg

SEQ ID NO: 6621 - RNA, 21 nt, synthetic construct
  misc_feature 1..21: note = Synthetic
  source 1..21: mol_type = other RNA
gtgatttaacacctcccctgc

SEQ ID NO: 6622 - RNA, 21 nt, synthetic construct
  misc_feature 1..21: note = Synthetic
  source 1..21: mol_type = other RNA
tgatttaacacctcccctgct

SEQ ID NO: 6623 - RNA, 21 nt, synthetic construct
  misc_feature 1..21: note = Synthetic
  source 1..21: mol_type = other RNA
gatttaacacctcccctgctg

SEQ ID NO: 6624 - RNA, 21 nt, synthetic construct
  misc_feature 1..21: note = Synthetic
  source 1..21: mol_type = other RNA
atttaacacctcccctgctgc

SEQ ID NO: 6625 - RNA, 21 nt, synthetic construct
  misc_feature 1..21: note = Synthetic
  source 1..21: mol_type = other RNA
tttaacacctcccctgctgct

SEQ ID NO: 6626 - RNA, 21 nt, synthetic construct
  misc_feature 1..21: note = Synthetic
  source 1..21: mol_type = other RNA
ttaacacctcccctgctgctg

SEQ ID NO: 6627 - RNA, 21 nt, synthetic construct
  misc_feature 1..21: note = Synthetic
  source 1..21: mol_type = other RNA
taacacctcccctgctgctgg

SEQ ID NO: 6628 - RNA, 21 nt, synthetic construct
  misc_feature 1..21: note = Synthetic
  source 1..21: mol_type = other RNA
aacacctcccctgctgctggg

SEQ ID NO: 6629 - RNA, 21 nt, synthetic construct
  misc_feature 1..21: note = Synthetic
  source 1..21: mol_type = other RNA
acacctcccctgctgctgggc

SEQ ID NO: 6630 - RNA, 21 nt, synthetic construct
  misc_feature 1..21: note = Synthetic
  source 1..21: mol_type = other RNA
cacctcccctgctgctgggct

SEQ ID NO: 6631 - RNA, 21 nt, synthetic construct
  misc_feature 1..21: note = Synthetic
  source 1..21: mol_type = other RNA
acctcccctgctgctgggctc

SEQ ID NO: 6632 - RNA, 21 nt, synthetic construct
  misc_feature 1..21: note = Synthetic
  source 1..21: mol_type = other RNA
cctcccctgctgctgggctcc

SEQ ID NO: 6633 - RNA, 21 nt, synthetic construct
  misc_feature 1..21: note = Synthetic
  source 1..21: mol_type = other RNA
ctcccctgctgctgggctccc

SEQ ID NO: 6634 - RNA, 21 nt, synthetic construct
  misc_feature 1..21: note = Synthetic
  source 1..21: mol_type = other RNA
tcccctgctgctgggctcccc

SEQ ID NO: 6635 - RNA, 21 nt, synthetic construct
  misc_feature 1..21: note = Synthetic
  source 1..21: mol_type = other RNA
cccctgctgctgggctcccct

SEQ ID NO: 6636 - RNA, 21 nt, synthetic construct
  misc_feature 1..21: note = Synthetic
  source 1..21: mol_type = other RNA
ccctgctgctgggctcccctc

SEQ ID NO: 6637 - RNA, 21 nt, synthetic construct
  misc_feature 1..21: note = Synthetic
  source 1..21: mol_type = other RNA
cctgctgctgggctcccctca

SEQ ID NO: 6638 - RNA, 21 nt, synthetic construct
  misc_feature 1..21: note = Synthetic
  source 1..21: mol_type = other RNA
ctgctgctgggctcccctcat

SEQ ID NO: 6639 - RNA, 21 nt, synthetic construct
  misc_feature 1..21: note = Synthetic
  source 1..21: mol_type = other RNA
tgctgctgggctcccctcatc

SEQ ID NO: 6640 - RNA, 21 nt, synthetic construct
  misc_feature 1..21: note = Synthetic
  source 1..21: mol_type = other RNA
gctgctgggctcccctcatct

SEQ ID NO: 6641 - RNA, 21 nt, synthetic construct
  misc_feature 1..21: note = Synthetic
  source 1..21: mol_type = other RNA
ctgctgggctcccctcatctc

SEQ ID NO: 6642 - RNA, 21 nt, synthetic construct
  misc_feature 1..21: note = Synthetic
  source 1..21: mol_type = other RNA
tgctgggctcccctcatctcg

SEQ ID NO: 6643 - RNA, 21 nt, synthetic construct
  misc_feature 1..21: note = Synthetic
  source 1..21: mol_type = other RNA
gctgggctcccctcatctcga

SEQ ID NO: 6644 - RNA, 21 nt, synthetic construct
  misc_feature 1..21: note = Synthetic
  source 1..21: mol_type = other RNA
ctgggctcccctcatctcgag

SEQ ID NO: 6645 - RNA, 21 nt, synthetic construct
  misc_feature 1..21: note = Synthetic
  source 1..21: mol_type = other RNA
tgggctcccctcatctcgagt

SEQ ID NO: 6646 - RNA, 21 nt, synthetic construct
  misc_feature 1..21: note = Synthetic
  source 1..21: mol_type = other RNA
gggctcccctcatctcgagtc

SEQ ID NO: 6647 - RNA, 21 nt, synthetic construct
  misc_feature 1..21: note = Synthetic
  source 1..21: mol_type = other RNA
ggctcccctcatctcgagtcc

SEQ ID NO: 6648 - RNA, 21 nt, synthetic construct
  misc_feature 1..21: note = Synthetic
  source 1..21: mol_type = other RNA
gctcccctcatctcgagtcca

SEQ ID NO: 6649 - RNA, 21 nt, synthetic construct
  misc_feature 1..21: note = Synthetic
  source 1..21: mol_type = other RNA
ctcccctcatctcgagtccag

SEQ ID NO: 6650 - RNA, 21 nt, synthetic construct
  misc_feature 1..21: note = Synthetic
  source 1..21: mol_type = other RNA
tcccctcatctcgagtccaga

SEQ ID NO: 6651 - RNA, 21 nt, synthetic construct
  misc_feature 1..21: note = Synthetic
  source 1..21: mol_type = other RNA
cccctcatctcgagtccagag

SEQ ID NO: 6652 - RNA, 21 nt, synthetic construct
  misc_feature 1..21: note = Synthetic
  source 1..21: mol_type = other RNA
ccctcatctcgagtccagagg

SEQ ID NO: 6653 - RNA, 21 nt, synthetic construct
  misc_feature 1..21: note = Synthetic
  source 1..21: mol_type = other RNA
cctcatctcgagtccagaggt

SEQ ID NO: 6654 - RNA, 21 nt, synthetic construct
  misc_feature 1..21: note = Synthetic
  source 1..21: mol_type = other RNA
ctcatctcgagtccagaggta

SEQ ID NO: 6655 - RNA, 21 nt, synthetic construct
  misc_feature 1..21: note = Synthetic
  source 1..21: mol_type = other RNA
tcatctcgagtccagaggtag

SEQ ID NO: 6656 - RNA, 21 nt, synthetic construct
  misc_feature 1..21: note = Synthetic
  source 1..21: mol_type = other RNA
catctcgagtccagaggtagc

SEQ ID NO: 6657 - RNA, 21 nt, synthetic construct
  misc_feature 1..21: note = Synthetic
  source 1..21: mol_type = other RNA
atctcgagtccagaggtagct

SEQ ID NO: 6658 - RNA, 21 nt, synthetic construct
  misc_feature 1..21: note = Synthetic
  source 1..21: mol_type = other RNA
tctcgagtccagaggtagctg

SEQ ID NO: 6659 - RNA, 21 nt, synthetic construct
  misc_feature 1..21: note = Synthetic
  source 1..21: mol_type = other RNA
ctcgagtccagaggtagctga

SEQ ID NO: 6660 - RNA, 21 nt, synthetic construct
  misc_feature 1..21: note = Synthetic
  source 1..21: mol_type = other RNA
tcgagtccagaggtagctgac

SEQ ID NO: 6661 - RNA, 21 nt, synthetic construct
  misc_feature 1..21: note = Synthetic
  source 1..21: mol_type = other RNA
cgagtccagaggtagctgact

SEQ ID NO: 6662 - RNA, 21 nt, synthetic construct
  misc_feature 1..21: note = Synthetic
  source 1..21: mol_type = other RNA
gagtccagaggtagctgacta

SEQ ID NO: 6663 - RNA, 21 nt, synthetic construct
  misc_feature 1..21: note = Synthetic
  source 1..21: mol_type = other RNA
agtccagaggtagctgactat

SEQ ID NO: 6664 - RNA, 21 nt, synthetic construct
  misc_feature 1..21: note = Synthetic
  source 1..21: mol_type = other RNA
gtccagaggtagctgactatt

SEQ ID NO: 6665 - RNA, 21 nt, synthetic construct
  misc_feature 1..21: note = Synthetic
  source 1..21: mol_type = other RNA
tccagaggtagctgactattc

SEQ ID NO: 6666 - RNA, 21 nt, synthetic construct
  misc_feature 1..21: note = Synthetic
  source 1..21: mol_type = other RNA
ccagaggtagctgactattcc

SEQ ID NO: 6667 - RNA, 21 nt, synthetic construct
  misc_feature 1..21: note = Synthetic
  source 1..21: mol_type = other RNA
cagaggtagctgactattccc

SEQ ID NO: 6668 - RNA, 21 nt, synthetic construct
  misc_feature 1..21: note = Synthetic
  source 1..21: mol_type = other RNA
agaggtagctgactattccct

SEQ ID NO: 6669 - RNA, 21 nt, synthetic construct
  misc_feature 1..21: note = Synthetic
  source 1..21: mol_type = other RNA
gaggtagctgactattccctt

SEQ ID NO: 6670 - RNA, 21 nt, synthetic construct
  misc_feature 1..21: note = Synthetic
  source 1..21: mol_type = other RNA
aggtagctgactattcccttg

SEQ ID NO: 6671 - RNA, 21 nt, synthetic construct
  misc_feature 1..21: note = Synthetic
  source 1..21: mol_type = other RNA
ggtagctgactattcccttgt

SEQ ID NO: 6672 - RNA, 21 nt, synthetic construct
  misc_feature 1..21: note = Synthetic
  source 1..21: mol_type = other RNA
gtagctgactattcccttgtc

SEQ ID NO: 6673 - RNA, 21 nt, synthetic construct
  misc_feature 1..21: note = Synthetic
  source 1..21: mol_type = other RNA
tagctgactattcccttgtca

SEQ ID NO: 6674 - RNA, 21 nt, synthetic construct
  misc_feature 1..21: note = Synthetic
  source 1..21: mol_type = other RNA
agctgactattcccttgtcat

SEQ ID NO: 6675 - RNA, 21 nt, synthetic construct
  misc_feature 1..21: note = Synthetic
  source 1..21: mol_type = other RNA
gctgactattcccttgtcatc

SEQ ID NO: 6676 - RNA, 21 nt, synthetic construct
  misc_feature 1..21: note = Synthetic
  source 1..21: mol_type = other RNA
ctgactattcccttgtcatct

SEQ ID NO: 6677 - RNA, 21 nt, synthetic construct
  misc_feature 1..21: note = Synthetic
  source 1..21: mol_type = other RNA
tgactattcccttgtcatctg

SEQ ID NO: 6678 - RNA, 21 nt, synthetic construct
  misc_feature 1..21: note = Synthetic
  source 1..21: mol_type = other RNA
gactattcccttgtcatctga

SEQ ID NO: 6679 - RNA, 21 nt, synthetic construct
  misc_feature 1..21: note = Synthetic
  source 1..21: mol_type = other RNA
actattcccttgtcatctgag

SEQ ID NO: 6680 - RNA, 21 nt, synthetic construct
  misc_feature 1..21: note = Synthetic
  source 1..21: mol_type = other RNA
ctattcccttgtcatctgagg

SEQ ID NO: 6681 - RNA, 21 nt, synthetic construct
  misc_feature 1..21: note = Synthetic
  source 1..21: mol_type = other RNA
tattcccttgtcatctgagga

SEQ ID NO: 6682 - RNA, 21 nt, synthetic construct
  misc_feature 1..21: note = Synthetic
  source 1..21: mol_type = other RNA
attcccttgtcatctgaggac

SEQ ID NO: 6683 - RNA, 21 nt, synthetic construct
  misc_feature 1..21: note = Synthetic
  source 1..21: mol_type = other RNA
ttcccttgtcatctgaggact

SEQ ID NO: 6684 - RNA, 21 nt, synthetic construct
  misc_feature 1..21: note = Synthetic
  source 1..21: mol_type = other RNA
tcccttgtcatctgaggactt

SEQ ID NO: 6685 - RNA, 21 nt, synthetic construct
  misc_feature 1..21: note = Synthetic
  source 1..21: mol_type = other RNA
cccttgtcatctgaggactta

SEQ ID NO: 6686 - RNA, 21 nt, synthetic construct
  misc_feature 1..21: note = Synthetic
  source 1..21: mol_type = other RNA
ccttgtcatctgaggacttag

SEQ ID NO: 6687 - RNA, 21 nt, synthetic construct
  misc_feature 1..21: note = Synthetic
  source 1..21: mol_type = other RNA
cttgtcatctgaggacttaga

SEQ ID NO: 6688 - RNA, 21 nt, synthetic construct
  misc_feature 1..21: note = Synthetic
  source 1..21: mol_type = other RNA
ttgtcatctgaggacttagag

SEQ ID NO: 6689 - RNA, 21 nt, synthetic construct
  misc_feature 1..21: note = Synthetic
  source 1..21: mol_type = other RNA
tgtcatctgaggacttagagc

SEQ ID NO: 6690 - RNA, 21 nt, synthetic construct
  misc_feature 1..21: note = Synthetic
  source 1..21: mol_type = other RNA
gtcatctgaggacttagagcc

SEQ ID NO: 6691 - RNA, 21 nt, synthetic construct
  misc_feature 1..21: note = Synthetic
  source 1..21: mol_type = other RNA
tcatctgaggacttagagcca

SEQ ID NO: 6692 - RNA, 21 nt, synthetic construct
  misc_feature 1..21: note = Synthetic
  source 1..21: mol_type = other RNA
catctgaggacttagagccat

SEQ ID NO: 6693 - RNA, 21 nt, synthetic construct
  misc_feature 1..21: note = Synthetic
  source 1..21: mol_type = other RNA
atctgaggacttagagccatc

SEQ ID NO: 6694 - RNA, 21 nt, synthetic construct
  misc_feature 1..21: note = Synthetic
  source 1..21: mol_type = other RNA
tctgaggacttagagccatcc

SEQ ID NO: 6695 - RNA, 21 nt, synthetic construct
  misc_feature 1..21: note = Synthetic
  source 1..21: mol_type = other RNA
ctgaggacttagagccatcca

SEQ ID NO: 6696 - RNA, 21 nt, synthetic construct
  misc_feature 1..21: note = Synthetic
  source 1..21: mol_type = other RNA
tgaggacttagagccatccag

SEQ ID NO: 6697 - RNA, 21 nt, synthetic construct
  misc_feature 1..21: note = Synthetic
  source 1..21: mol_type = other RNA
gaggacttagagccatccagc

SEQ ID NO: 6698 - RNA, 21 nt, synthetic construct
  misc_feature 1..21: note = Synthetic
  source 1..21: mol_type = other RNA
aggacttagagccatccagct

SEQ ID NO: 6699 - RNA, 21 nt, synthetic construct
  misc_feature 1..21: note = Synthetic
  source 1..21: mol_type = other RNA
ggacttagagccatccagctc

SEQ ID NO: 6700 - RNA, 21 nt, synthetic construct
  misc_feature 1..21: note = Synthetic
  source 1..21: mol_type = other RNA
gacttagagccatccagctct

SEQ ID NO: 6701 - RNA, 21 nt, synthetic construct
  misc_feature 1..21: note = Synthetic
  source 1..21: mol_type = other RNA
acttagagccatccagctctg

SEQ ID NO: 6702 - RNA, 21 nt, synthetic construct
  misc_feature 1..21: note = Synthetic
  source 1..21: mol_type = other RNA
cttagagccatccagctctgc

SEQ ID NO: 6703 - RNA, 21 nt, synthetic construct
  misc_feature 1..21: note = Synthetic
  source 1..21: mol_type = other RNA
ttagagccatccagctctgct

SEQ ID NO: 6704 - RNA, 21 nt, synthetic construct
  misc_feature 1..21: note = Synthetic
  source 1..21: mol_type = other RNA
tagagccatccagctctgctg

SEQ ID NO: 6705 - RNA, 21 nt, synthetic construct
  misc_feature 1..21: note = Synthetic
  source 1..21: mol_type = other RNA
agagccatccagctctgctgt

SEQ ID NO: 6706 - RNA, 21 nt, synthetic construct
  misc_feature 1..21: note = Synthetic
  source 1..21: mol_type = other RNA
gagccatccagctctgctgtg

SEQ ID NO: 6707 - RNA, 21 nt, synthetic construct
  misc_feature 1..21: note = Synthetic
  source 1..21: mol_type = other RNA
agccatccagctctgctgtgc

SEQ ID NO: 6708 - RNA, 21 nt, synthetic construct
  misc_feature 1..21: note = Synthetic
  source 1..21: mol_type = other RNA
gccatccagctctgctgtgct

SEQ ID NO: 6709 - RNA, 21 nt, synthetic construct
  misc_feature 1..21: note = Synthetic
  source 1..21: mol_type = other RNA
ccatccagctctgctgtgctc

SEQ ID NO: 6710 - RNA, 21 nt, synthetic construct
  misc_feature 1..21: note = Synthetic
  source 1..21: mol_type = other RNA
catccagctctgctgtgctcg

SEQ ID NO: 6711 - RNA, 21 nt, synthetic construct
  misc_feature 1..21: note = Synthetic
  source 1..21: mol_type = other RNA
atccagctctgctgtgctcgt

SEQ ID NO: 6712 - RNA, 21 nt, synthetic construct
  misc_feature 1..21: note = Synthetic
  source 1..21: mol_type = other RNA
tccagctctgctgtgctcgtg

SEQ ID NO: 6713 - RNA, 21 nt, synthetic construct
  misc_feature 1..21: note = Synthetic
  source 1..21: mol_type = other RNA
ccagctctgctgtgctcgtgg

SEQ ID NO: 6714 - RNA, 21 nt, synthetic construct
  misc_feature 1..21: note = Synthetic
  source 1..21: mol_type = other RNA
cagctctgctgtgctcgtggg

SEQ ID NO: 6715 - RNA, 21 nt, synthetic construct
  misc_feature 1..21: note = Synthetic
  source 1..21: mol_type = other RNA
agctctgctgtgctcgtgggt

SEQ ID NO: 6716 - RNA, 21 nt, synthetic construct
  misc_feature 1..21: note = Synthetic
  source 1..21: mol_type = other RNA
gctctgctgtgctcgtgggta

SEQ ID NO: 6717 - RNA, 21 nt, synthetic construct
  misc_feature 1..21: note = Synthetic
  source 1..21: mol_type = other RNA
ctctgctgtgctcgtgggtag

SEQ ID NO: 6718 - RNA, 21 nt, synthetic construct
  misc_feature 1..21: note = Synthetic
  source 1..21: mol_type = other RNA
tctgctgtgctcgtgggtagg

SEQ ID NO: 6719 - RNA, 21 nt, synthetic construct
  misc_feature 1..21: note = Synthetic
  source 1..21: mol_type = other RNA
ctgctgtgctcgtgggtaggg

SEQ ID NO: 6720 - RNA, 21 nt, synthetic construct
  misc_feature 1..21: note = Synthetic
  source 1..21: mol_type = other RNA
tgctgtgctcgtgggtagggt

SEQ ID NO: 6721 - RNA, 21 nt, synthetic construct
  misc_feature 1..21: note = Synthetic
  source 1..21: mol_type = other RNA
gctgtgctcgtgggtagggta

SEQ ID NO: 6722 - RNA, 21 nt, synthetic construct
  misc_feature 1..21: note = Synthetic
  source 1..21: mol_type = other RNA
ctgtgctcgtgggtagggtaa

SEQ ID NO: 6723 - RNA, 21 nt, synthetic construct
  misc_feature 1..21: note = Synthetic
  source 1..21: mol_type = other RNA
tgtgctcgtgggtagggtaat

SEQ ID NO: 6724 - RNA, 21 nt, synthetic construct
  misc_feature 1..21: note = Synthetic
  source 1..21: mol_type = other RNA
gtgctcgtgggtagggtaatc

SEQ ID NO: 6725 - RNA, 21 nt, synthetic construct
  misc_feature 1..21: note = Synthetic
  source 1..21: mol_type = other RNA
tgctcgtgggtagggtaatca

SEQ ID NO: 6726 - RNA, 21 nt, synthetic construct
  misc_feature 1..21: note = Synthetic
  source 1..21: mol_type = other RNA
gctcgtgggtagggtaatcac

SEQ ID NO: 6727 - RNA, 21 nt, synthetic construct
  misc_feature 1..21: note = Synthetic
  source 1..21: mol_type = other RNA
ctcgtgggtagggtaatcacc

SEQ ID NO: 6728 - RNA, 21 nt, synthetic construct
  misc_feature 1..21: note = Synthetic
  source 1..21: mol_type = other RNA
tcgtgggtagggtaatcacca

SEQ ID NO: 6729 - RNA, 21 nt, synthetic construct
  misc_feature 1..21: note = Synthetic
  source 1..21: mol_type = other RNA
cgtgggtagggtaatcaccac

SEQ ID NO: 6730 - RNA, 21 nt, synthetic construct
  misc_feature 1..21: note = Synthetic
  source 1..21: mol_type = other RNA
gtgggtagggtaatcaccaca

SEQ ID NO: 6731 - RNA, 21 nt, synthetic construct
  misc_feature 1..21: note = Synthetic
  source 1..21: mol_type = other RNA
tgggtagggtaatcaccacat

SEQ ID NO: 6732 - RNA, 21 nt, synthetic construct
  misc_feature 1..21: note = Synthetic
  source 1..21: mol_type = other RNA
gggtagggtaatcaccacatt

SEQ ID NO: 6733 - RNA, 21 nt, synthetic construct
  misc_feature 1..21: note = Synthetic
  source 1..21: mol_type = other RNA
ggtagggtaatcaccacattc

SEQ ID NO: 6734 - RNA, 21 nt, synthetic construct
  misc_feature 1..21: note = Synthetic
  source 1..21: mol_type = other RNA
gtagggtaatcaccacattcc

SEQ ID NO: 6735 - RNA, 21 nt, synthetic construct
  misc_feature 1..21: note = Synthetic
  source 1..21: mol_type = other RNA
tagggtaatcaccacattccc

SEQ ID NO: 6736 - RNA, 21 nt, synthetic construct
  misc_feature 1..21: note = Synthetic
  source 1..21: mol_type = other RNA
agggtaatcaccacattccca

SEQ ID NO: 6737 - RNA, 21 nt, synthetic construct
  misc_feature 1..21: note = Synthetic
  source 1..21: mol_type = other RNA
gggtaatcaccacattcccag

SEQ ID NO: 6738 - RNA, 21 nt, synthetic construct
  misc_feature 1..21: note = Synthetic
  source 1..21: mol_type = other RNA
ggtaatcaccacattcccagt

SEQ ID NO: 6739 - RNA, 21 nt, synthetic construct
  misc_feature 1..21: note = Synthetic
  source 1..21: mol_type = other RNA
gtaatcaccacattcccagtt

SEQ ID NO: 6740 - RNA, 21 nt, synthetic construct
  misc_feature 1..21: note = Synthetic
  source 1..21: mol_type = other RNA
taatcaccacattcccagtta

SEQ ID NO: 6741 - RNA, 21 nt, synthetic construct
  misc_feature 1..21: note = Synthetic
  source 1..21: mol_type = other RNA
aatcaccacattcccagttat

SEQ ID NO: 6742 - RNA, 21 nt, synthetic construct
  misc_feature 1..21: note = Synthetic
  source 1..21: mol_type = other RNA
atcaccacattcccagttatc

SEQ ID NO: 6743 - RNA, 21 nt, synthetic construct
  misc_feature 1..21: note = Synthetic
  source 1..21: mol_type = other RNA
tcaccacattcccagttatct

SEQ ID NO: 6744 - RNA, 21 nt, synthetic construct
  misc_feature 1..21: note = Synthetic
  source 1..21: mol_type = other RNA
caccacattcccagttatctt

SEQ ID NO: 6745 - RNA, 21 nt, synthetic construct
  misc_feature 1..21: note = Synthetic
  source 1..21: mol_type = other RNA
accacattcccagttatcttg

SEQ ID NO: 6746 - RNA, 21 nt, synthetic construct
  misc_feature 1..21: note = Synthetic
  source 1..21: mol_type = other RNA
ccacattcccagttatcttgg

SEQ ID NO: 6747 - RNA, 21 nt, synthetic construct
  misc_feature 1..21: note = Synthetic
  source 1..21: mol_type = other RNA
cacattcccagttatcttggc

SEQ ID NO: 6748 - RNA, 21 nt, synthetic construct
  misc_feature 1..21: note = Synthetic
  source 1..21: mol_type = other RNA
acattcccagttatcttggct

SEQ ID NO: 6749 - RNA, 21 nt, synthetic construct
  misc_feature 1..21: note = Synthetic
  source 1..21: mol_type = other RNA
cattcccagttatcttggcta

SEQ ID NO: 6750 - RNA, 21 nt, synthetic construct
  misc_feature 1..21: note = Synthetic
  source 1..21: mol_type = other RNA
attcccagttatcttggctat

SEQ ID NO: 6751 - RNA, 21 nt, synthetic construct
  misc_feature 1..21: note = Synthetic
  source 1..21: mol_type = other RNA
ttcccagttatcttggctata

SEQ ID NO: 6752 - RNA, 21 nt, synthetic construct
  misc_feature 1..21: note = Synthetic
  source 1..21: mol_type = other RNA
tcccagttatcttggctatag

SEQ ID NO: 6753 - RNA, 21 nt, synthetic construct
  misc_feature 1..21: note = Synthetic
  source 1..21: mol_type = other RNA
cccagttatcttggctatagg

SEQ ID NO: 6754 - RNA, 21 nt, synthetic construct
  misc_feature 1..21: note = Synthetic
  source 1..21: mol_type = other RNA
ccagttatcttggctataggt

SEQ ID NO: 6755 - RNA, 21 nt, synthetic construct
  misc_feature 1..21: note = Synthetic
  source 1..21: mol_type = other RNA
cagttatcttggctataggtg

SEQ ID NO: 6756 - RNA, 21 nt, synthetic construct
  misc_feature 1..21: note = Synthetic
  source 1..21: mol_type = other RNA
agttatcttggctataggtgg

SEQ ID NO: 6757 - RNA, 21 nt, synthetic construct
  misc_feature 1..21: note = Synthetic
  source 1..21: mol_type = other RNA
gttatcttggctataggtggt

SEQ ID NO: 6758 - RNA, 21 nt, synthetic construct
  misc_feature 1..21: note = Synthetic
  source 1..21: mol_type = other RNA
ttatcttggctataggtggtt

SEQ ID NO: 6759 - RNA, 21 nt, synthetic construct
  misc_feature 1..21: note = Synthetic
  source 1..21: mol_type = other RNA
tatcttggctataggtggttt

SEQ ID NO: 6760 - RNA, 21 nt, synthetic construct
  misc_feature 1..21: note = Synthetic
  source 1..21: mol_type = other RNA
atcttggctataggtggtttg

SEQ ID NO: 6761 - RNA, 21 nt, synthetic construct
  misc_feature 1..21: note = Synthetic
  source 1..21: mol_type = other RNA
tcttggctataggtggtttgt

SEQ ID NO: 6762 - RNA, 21 nt, synthetic construct
  misc_feature 1..21: note = Synthetic
  source 1..21: mol_type = other RNA
cttggctataggtggtttgtt

SEQ ID NO: 6763 - RNA, 21 nt, synthetic construct
  misc_feature 1..21: note = Synthetic
  source 1..21: mol_type = other RNA
ttggctataggtggtttgttt

SEQ ID NO: 6764 - RNA, 21 nt, synthetic construct
  misc_feature 1..21: note = Synthetic
  source 1..21: mol_type = other RNA
tggctataggtggtttgttta

SEQ ID NO: 6765 - RNA, 21 nt, synthetic construct
  misc_feature 1..21: note = Synthetic
  source 1..21: mol_type = other RNA
ggctataggtggtttgtttat

SEQ ID NO: 6766 - RNA, 21 nt, synthetic construct
  misc_feature 1..21: note = Synthetic
  source 1..21: mol_type = other RNA
gctataggtggtttgtttatt

SEQ ID NO: 6767 - RNA, 21 nt, synthetic construct
  misc_feature 1..21: note = Synthetic
  source 1..21: mol_type = other RNA
ctataggtggtttgtttattt

SEQ ID NO: 6768 - RNA, 21 nt, synthetic construct
  misc_feature 1..21: note = Synthetic
  source 1..21: mol_type = other RNA
tataggtggtttgtttatttc

SEQ ID NO: 6769 - RNA, 21 nt, synthetic construct
  misc_feature 1..21: note = Synthetic
  source 1..21: mol_type = other RNA
ataggtggtttgtttatttct

SEQ ID NO: 6770 - RNA, 21 nt, synthetic construct
  misc_feature 1..21: note = Synthetic
  source 1..21: mol_type = other RNA
taggtggtttgtttatttctt

SEQ ID NO: 6771 - RNA, 21 nt, synthetic construct
  misc_feature 1..21: note = Synthetic
  source 1..21: mol_type = other RNA
aggtggtttgtttatttcttc

SEQ ID NO: 6772 - RNA, 21 nt, synthetic construct
  misc_feature 1..21: note = Synthetic
  source 1..21: mol_type = other RNA
ggtggtttgtttatttcttct

SEQ ID NO: 6773 - RNA, 21 nt, synthetic construct
  misc_feature 1..21: note = Synthetic
  source 1..21: mol_type = other RNA
gtggtttgtttatttcttctt

SEQ ID NO: 6774 - RNA, 21 nt, synthetic construct
  misc_feature 1..21: note = Synthetic
  source 1..21: mol_type = other RNA
tggtttgtttatttcttcttt

SEQ ID NO: 6775 - RNA, 21 nt, synthetic construct
  misc_feature 1..21: note = Synthetic
  source 1..21: mol_type = other RNA
ggtttgtttatttcttctttg

SEQ ID NO: 6776 - RNA, 21 nt, synthetic construct
  misc_feature 1..21: note = Synthetic
  source 1..21: mol_type = other RNA
gtttgtttatttcttctttga

SEQ ID NO: 6777 - RNA, 21 nt, synthetic construct
  misc_feature 1..21: note = Synthetic
  source 1..21: mol_type = other RNA
tttgtttatttcttctttgac

SEQ ID NO: 6778 - RNA, 21 nt, synthetic construct
  misc_feature 1..21: note = Synthetic
  source 1..21: mol_type = other RNA
ttgtttatttcttctttgaca

SEQ ID NO: 6779 - RNA, 21 nt, synthetic construct
  misc_feature 1..21: note = Synthetic
  source 1..21: mol_type = other RNA
tgtttatttcttctttgacaa

SEQ ID NO: 6780 - RNA, 21 nt, synthetic construct
  misc_feature 1..21: note = Synthetic
  source 1..21: mol_type = other RNA
gtttatttcttctttgacaat

SEQ ID NO: 6781 - RNA, 21 nt, synthetic construct
  misc_feature 1..21: note = Synthetic
  source 1..21: mol_type = other RNA
tttatttcttctttgacaatg

SEQ ID NO: 6782 - RNA, 21 nt, synthetic construct
  misc_feature 1..21: note = Synthetic
  source 1..21: mol_type = other RNA
ttatttcttctttgacaatga

SEQ ID NO: 6783 - RNA, 21 nt, synthetic construct
  misc_feature 1..21: note = Synthetic
  source 1..21: mol_type = other RNA
tatttcttctttgacaatgac

SEQ ID NO: 6784 - RNA, 21 nt, synthetic construct
  misc_feature 1..21: note = Synthetic
  source 1..21: mol_type = other RNA
atttcttctttgacaatgaca

SEQ ID NO: 6785 - RNA, 21 nt, synthetic construct
  misc_feature 1..21: note = Synthetic
  source 1..21: mol_type = other RNA
tttcttctttgacaatgacat

SEQ ID NO: 6786 - RNA, 21 nt, synthetic construct
  misc_feature 1..21: note = Synthetic
  source 1..21: mol_type = other RNA
ttcttctttgacaatgacatt

SEQ ID NO: 6787 - RNA, 21 nt, synthetic construct
  misc_feature 1..21: note = Synthetic
  source 1..21: mol_type = other RNA
tcttctttgacaatgacattc

SEQ ID NO: 6788 - RNA, 21 nt, synthetic construct
  misc_feature 1..21: note = Synthetic
  source 1..21: mol_type = other RNA
cttctttgacaatgacattca

SEQ ID NO: 6789 - RNA, 21 nt, synthetic construct
  misc_feature 1..21: note = Synthetic
  source 1..21: mol_type = other RNA
ttctttgacaatgacattcac

SEQ ID NO: 6790 - RNA, 21 nt, synthetic construct
  misc_feature 1..21: note = Synthetic
  source 1..21: mol_type = other RNA
tctttgacaatgacattcaca

SEQ ID NO: 6791 - RNA, 21 nt, synthetic construct
  misc_feature 1..21: note = Synthetic
  source 1..21: mol_type = other RNA
ctttgacaatgacattcacag

SEQ ID NO: 6792 - RNA, 21 nt, synthetic construct
  misc_feature 1..21: note = Synthetic
  source 1..21: mol_type = other RNA
tttgacaatgacattcacaga

SEQ ID NO: 6793 - RNA, 21 nt, synthetic construct
  misc_feature 1..21: note = Synthetic
  source 1..21: mol_type = other RNA
ttgacaatgacattcacagag

SEQ ID NO: 6794 - RNA, 21 nt, synthetic construct
  misc_feature 1..21: note = Synthetic
  source 1..21: mol_type = other RNA
tgacaatgacattcacagagc

SEQ ID NO: 6795 - RNA, 21 nt, synthetic construct
  misc_feature 1..21: note = Synthetic
  source 1..21: mol_type = other RNA
gacaatgacattcacagagct

SEQ ID NO: 6796 - RNA, 21 nt, synthetic construct
  misc_feature 1..21: note = Synthetic
  source 1..21: mol_type = other RNA
acaatgacattcacagagctc

SEQ ID NO: 6797 - RNA, 21 nt, synthetic construct
  misc_feature 1..21: note = Synthetic
  source 1..21: mol_type = other RNA
caatgacattcacagagctct

SEQ ID NO: 6798 - RNA, 21 nt, synthetic construct
  misc_feature 1..21: note = Synthetic
  source 1..21: mol_type = other RNA
aatgacattcacagagctctg

SEQ ID NO: 6799 - RNA, 21 nt, synthetic construct
  misc_feature 1..21: note = Synthetic
  source 1..21: mol_type = other RNA
atgacattcacagagctctgg

SEQ ID NO: 6800 - RNA, 21 nt, synthetic construct
  misc_feature 1..21: note = Synthetic
  source 1..21: mol_type = other RNA
tgacattcacagagctctggc

SEQ ID NO: 6801 - RNA, 21 nt, synthetic construct
  misc_feature 1..21: note = Synthetic
  source 1..21: mol_type = other RNA
gacattcacagagctctggct

SEQ ID NO: 6802 - RNA, 21 nt, synthetic construct
  misc_feature 1..21: note = Synthetic
  source 1..21: mol_type = other RNA
acattcacagagctctggctt

SEQ ID NO: 6803 - RNA, 21 nt, synthetic construct
  misc_feature 1..21: note = Synthetic
  source 1..21: mol_type = other RNA
cattcacagagctctggcttt

SEQ ID NO: 6804 - RNA, 21 nt, synthetic construct
  misc_feature 1..21: note = Synthetic
  source 1..21: mol_type = other RNA
attcacagagctctggctttg

SEQ ID NO: 6805 - RNA, 21 nt, synthetic construct
  misc_feature 1..21: note = Synthetic
  source 1..21: mol_type = other RNA
ttcacagagctctggctttgc

SEQ ID NO: 6806 - RNA, 21 nt, synthetic construct
  misc_feature 1..21: note = Synthetic
  source 1..21: mol_type = other RNA
tcacagagctctggctttgca

SEQ ID NO: 6807 - RNA, 21 nt, synthetic construct
  misc_feature 1..21: note = Synthetic
  source 1..21: mol_type = other RNA
cacagagctctggctttgcag

SEQ ID NO: 6808 - RNA, 21 nt, synthetic construct
  misc_feature 1..21: note = Synthetic
  source 1..21: mol_type = other RNA
acagagctctggctttgcagg

SEQ ID NO: 6809 - RNA, 21 nt, synthetic construct
  misc_feature 1..21: note = Synthetic
  source 1..21: mol_type = other RNA
cagagctctggctttgcaggt

SEQ ID NO: 6810 - RNA, 21 nt, synthetic construct
  misc_feature 1..21: note = Synthetic
  source 1..21: mol_type = other RNA
agagctctggctttgcaggtt

SEQ ID NO: 6811 - RNA, 21 nt, synthetic construct
  misc_feature 1..21: note = Synthetic
  source 1..21: mol_type = other RNA
gagctctggctttgcaggttc

SEQ ID NO: 6812 - RNA, 21 nt, synthetic construct
  misc_feature 1..21: note = Synthetic
  source 1..21: mol_type = other RNA
agctctggctttgcaggttcc

SEQ ID NO: 6813 - RNA, 21 nt, synthetic construct
  misc_feature 1..21: note = Synthetic
  source 1..21: mol_type = other RNA
gctctggctttgcaggttcct

SEQ ID NO: 6814 - RNA, 21 nt, synthetic construct
  misc_feature 1..21: note = Synthetic
  source 1..21: mol_type = other RNA
ctctggctttgcaggttcctc

SEQ ID NO: 6815 - RNA, 21 nt, synthetic construct
  misc_feature 1..21: note = Synthetic
  source 1..21: mol_type = other RNA
tctggctttgcaggttcctct

SEQ ID NO: 6816 - RNA, 21 nt, synthetic construct
  misc_feature 1..21: note = Synthetic
  source 1..21: mol_type = other RNA
ctggctttgcaggttcctctc

SEQ ID NO: 6817 - RNA, 21 nt, synthetic construct
  misc_feature 1..21: note = Synthetic
  source 1..21: mol_type = other RNA
tggctttgcaggttcctctca

SEQ ID NO: 6818 - RNA, 21 nt, synthetic construct
  misc_feature 1..21: note = Synthetic
  source 1..21: mol_type = other RNA
ggctttgcaggttcctctcat

SEQ ID NO: 6819 - RNA, 21 nt, synthetic construct
  misc_feature 1..21: note = Synthetic
  source 1..21: mol_type = other RNA
gctttgcaggttcctctcatc

SEQ ID NO: 6820 - RNA, 21 nt, synthetic construct
  misc_feature 1..21: note = Synthetic
  source 1..21: mol_type = other RNA
ctttgcaggttcctctcatct

SEQ ID NO: 6821 - RNA, 21 nt, synthetic construct
  misc_feature 1..21: note = Synthetic
  source 1..21: mol_type = other RNA
tttgcaggttcctctcatctt

SEQ ID NO: 6822 - RNA, 21 nt, synthetic construct
  misc_feature 1..21: note = Synthetic
  source 1..21: mol_type = other RNA
ttgcaggttcctctcatcttt

SEQ ID NO: 6823 - RNA, 21 nt, synthetic construct
  misc_feature 1..21: note = Synthetic
  source 1..21: mol_type = other RNA
tgcaggttcctctcatctttg

SEQ ID NO: 6824 - RNA, 21 nt, synthetic construct
  misc_feature 1..21: note = Synthetic
  source 1..21: mol_type = other RNA
gcaggttcctctcatctttga

SEQ ID NO: 6825 - RNA, 21 nt, synthetic construct
  misc_feature 1..21: note = Synthetic
  source 1..21: mol_type = other RNA
caggttcctctcatctttgac

SEQ ID NO: 6826 - RNA, 21 nt, synthetic construct
  misc_feature 1..21: note = Synthetic
  source 1..21: mol_type = other RNA
aggttcctctcatctttgaca

SEQ ID NO: 6827 - RNA, 21 nt, synthetic construct
  misc_feature 1..21: note = Synthetic
  source 1..21: mol_type = other RNA
ggttcctctcatctttgacag

SEQ ID NO: 6828 - RNA, 21 nt, synthetic construct
  misc_feature 1..21: note = Synthetic
  source 1..21: mol_type = other RNA
gttcctctcatctttgacagt

SEQ ID NO: 6829 - RNA, 21 nt, synthetic construct
  misc_feature 1..21: note = Synthetic
  source 1..21: mol_type = other RNA
ttcctctcatctttgacagtc

SEQ ID NO: 6830 - RNA, 21 nt, synthetic construct
  misc_feature 1..21: note = Synthetic
  source 1..21: mol_type = other RNA
tcctctcatctttgacagtca

SEQ ID NO: 6831 - RNA, 21 nt, synthetic construct
  misc_feature 1..21: note = Synthetic
  source 1..21: mol_type = other RNA
cctctcatctttgacagtcaa

SEQ ID NO: 6832 - RNA, 21 nt, synthetic construct
  misc_feature 1..21: note = Synthetic
  source 1..21: mol_type = other RNA
ctctcatctttgacagtcaag

SEQ ID NO: 6833 - RNA, 21 nt, synthetic construct
  misc_feature 1..21: note = Synthetic
  source 1..21: mol_type = other RNA
tctcatctttgacagtcaagg

SEQ ID NO: 6834 - RNA, 21 nt, synthetic construct
  misc_feature 1..21: note = Synthetic
  source 1..21: mol_type = other RNA
ctcatctttgacagtcaaggt

SEQ ID NO: 6835 - RNA, 21 nt, synthetic construct
  misc_feature 1..21: note = Synthetic
  source 1..21: mol_type = other RNA
tcatctttgacagtcaaggtg

SEQ ID NO: 6836 - RNA, 21 nt, synthetic construct
  misc_feature 1..21: note = Synthetic
  source 1..21: mol_type = other RNA
catctttgacagtcaaggtga

SEQ ID NO: 6837 - RNA, 21 nt, synthetic construct
  misc_feature 1..21: note = Synthetic
  source 1..21: mol_type = other RNA
atctttgacagtcaaggtgaa

SEQ ID NO: 6838 - RNA, 21 nt, synthetic construct
  misc_feature 1..21: note = Synthetic
  source 1..21: mol_type = other RNA
tctttgacagtcaaggtgaac

SEQ ID NO: 6839 - RNA, 21 nt, synthetic construct
  misc_feature 1..21: note = Synthetic
  source 1..21: mol_type = other RNA
ctttgacagtcaaggtgaaca

SEQ ID NO: 6840 - RNA, 21 nt, synthetic construct
  misc_feature 1..21: note = Synthetic
  source 1..21: mol_type = other RNA
tttgacagtcaaggtgaacac

SEQ ID NO: 6841 - RNA, 21 nt, synthetic construct
  misc_feature 1..21: note = Synthetic
  source 1..21: mol_type = other RNA
ttgacagtcaaggtgaacaca

SEQ ID NO: 6842 - RNA, 21 nt, synthetic construct
  misc_feature 1..21: note = Synthetic
  source 1..21: mol_type = other RNA
tgacagtcaaggtgaacacat

SEQ ID NO: 6843 - RNA, 21 nt, synthetic construct
  misc_feature 1..21: note = Synthetic
  source 1..21: mol_type = other RNA
gacagtcaaggtgaacacata

SEQ ID NO: 6844 - RNA, 21 nt, synthetic construct
  misc_feature 1..21: note = Synthetic
  source 1..21: mol_type = other RNA
acagtcaaggtgaacacatag

SEQ ID NO: 6845 - RNA, 21 nt, synthetic construct
  misc_feature 1..21: note = Synthetic
  source 1..21: mol_type = other RNA
cagtcaaggtgaacacatagg

SEQ ID NO: 6846 - RNA, 21 nt, synthetic construct
  misc_feature 1..21: note = Synthetic
  source 1..21: mol_type = other RNA
agtcaaggtgaacacataggt

SEQ ID NO: 6847 - RNA, 21 nt, synthetic construct
  misc_feature 1..21: note = Synthetic
  source 1..21: mol_type = other RNA
gtcaaggtgaacacataggtc

SEQ ID NO: 6848 - RNA, 21 nt, synthetic construct
  misc_feature 1..21: note = Synthetic
  source 1..21: mol_type = other RNA
tcaaggtgaacacataggtcc

SEQ ID NO: 6849 - RNA, 21 nt, synthetic construct
  misc_feature 1..21: note = Synthetic
  source 1..21: mol_type = other RNA
caaggtgaacacataggtccc

SEQ ID NO: 6850 - RNA, 21 nt, synthetic construct
  misc_feature 1..21: note = Synthetic
  source 1..21: mol_type = other RNA
aaggtgaacacataggtcccc

SEQ ID NO: 6851 - RNA, 21 nt, synthetic construct
  misc_feature 1..21: note = Synthetic
  source 1..21: mol_type = other RNA
aggtgaacacataggtcccca

SEQ ID NO: 6852 - RNA, 21 nt, synthetic construct
  misc_feature 1..21: note = Synthetic
  source 1..21: mol_type = other RNA
ggtgaacacataggtccccac

SEQ ID NO: 6853 - RNA, 21 nt, synthetic construct
  misc_feature 1..21: note = Synthetic
  source 1..21: mol_type = other RNA
gtgaacacataggtccccact

SEQ ID NO: 6854 - RNA, 21 nt, synthetic construct
  misc_feature 1..21: note = Synthetic
  source 1..21: mol_type = other RNA
tgaacacataggtccccactt

SEQ ID NO: 6855 - RNA, 21 nt, synthetic construct
  misc_feature 1..21: note = Synthetic
  source 1..21: mol_type = other RNA
gaacacataggtccccacttg

SEQ ID NO: 6856 - RNA, 21 nt, synthetic construct
  misc_feature 1..21: note = Synthetic
  source 1..21: mol_type = other RNA
aacacataggtccccacttgc

SEQ ID NO: 6857 - RNA, 21 nt, synthetic construct
  misc_feature 1..21: note = Synthetic
  source 1..21: mol_type = other RNA
acacataggtccccacttgca

SEQ ID NO: 6858 - RNA, 21 nt, synthetic construct
  misc_feature 1..21: note = Synthetic
  source 1..21: mol_type = other RNA
cacataggtccccacttgcag

SEQ ID NO: 6859 - RNA, 21 nt, synthetic construct
  misc_feature 1..21: note = Synthetic
  source 1..21: mol_type = other RNA
acataggtccccacttgcagc

SEQ ID NO: 6860 - RNA, 21 nt, synthetic construct
  misc_feature 1..21: note = Synthetic
  source 1..21: mol_type = other RNA
cataggtccccacttgcagcc

SEQ ID NO: 6861 - RNA, 21 nt, synthetic construct
  misc_feature 1..21: note = Synthetic
  source 1..21: mol_type = other RNA
ataggtccccacttgcagccc

SEQ ID NO: 6862 - RNA, 21 nt, synthetic construct
  misc_feature 1..21: note = Synthetic
  source 1..21: mol_type = other RNA
taggtccccacttgcagccca

SEQ ID NO: 6863 - RNA, 21 nt, synthetic construct
  misc_feature 1..21: note = Synthetic
  source 1..21: mol_type = other RNA
aggtccccacttgcagcccag

SEQ ID NO: 6864 - RNA, 21 nt, synthetic construct
  misc_feature 1..21: note = Synthetic
  source 1..21: mol_type = other RNA
ggtccccacttgcagcccagt

SEQ ID NO: 6865 - RNA, 21 nt, synthetic construct
  misc_feature 1..21: note = Synthetic
  source 1..21: mol_type = other RNA
gtccccacttgcagcccagtc

SEQ ID NO: 6866 - RNA, 21 nt, synthetic construct
  misc_feature 1..21: note = Synthetic
  source 1..21: mol_type = other RNA
tccccacttgcagcccagtca

SEQ ID NO: 6867 - RNA, 21 nt, synthetic construct
  misc_feature 1..21: note = Synthetic
  source 1..21: mol_type = other RNA
ccccacttgcagcccagtcac

SEQ ID NO: 6868 - RNA, 21 nt, synthetic construct
  misc_feature 1..21: note = Synthetic
  source 1..21: mol_type = other RNA
cccacttgcagcccagtcaca

SEQ ID NO: 6869 - RNA, 21 nt, synthetic construct
  misc_feature 1..21: note = Synthetic
  source 1..21: mol_type = other RNA
ccacttgcagcccagtcacag

SEQ ID NO: 6870 - RNA, 21 nt, synthetic construct
  misc_feature 1..21: note = Synthetic
  source 1..21: mol_type = other RNA
cacttgcagcccagtcacagt

SEQ ID NO: 6871 - RNA, 21 nt, synthetic construct
  misc_feature 1..21: note = Synthetic
  source 1..21: mol_type = other RNA
acttgcagcccagtcacagta

SEQ ID NO: 6872 - RNA, 21 nt, synthetic construct
  misc_feature 1..21: note = Synthetic
  source 1..21: mol_type = other RNA
cttgcagcccagtcacagtag

SEQ ID NO: 6873 - RNA, 21 nt, synthetic construct
  misc_feature 1..21: note = Synthetic
  source 1..21: mol_type = other RNA
ttgcagcccagtcacagtagc

SEQ ID NO: 6874 - RNA, 21 nt, synthetic construct
  misc_feature 1..21: note = Synthetic
  source 1..21: mol_type = other RNA
tgcagcccagtcacagtagca

SEQ ID NO: 6875 - RNA, 21 nt, synthetic construct
  misc_feature 1..21: note = Synthetic
  source 1..21: mol_type = other RNA
gcagcccagtcacagtagcaa

SEQ ID NO: 6876 - RNA, 21 nt, synthetic construct
  misc_feature 1..21: note = Synthetic
  source 1..21: mol_type = other RNA
cagcccagtcacagtagcaac

SEQ ID NO: 6877 - RNA, 21 nt, synthetic construct
  misc_feature 1..21: note = Synthetic
  source 1..21: mol_type = other RNA
agcccagtcacagtagcaaca

SEQ ID NO: 6878 - RNA, 21 nt, synthetic construct
  misc_feature 1..21: note = Synthetic
  source 1..21: mol_type = other RNA
gcccagtcacagtagcaacac

SEQ ID NO: 6879 - RNA, 21 nt, synthetic construct
  misc_feature 1..21: note = Synthetic
  source 1..21: mol_type = other RNA
cccagtcacagtagcaacact

SEQ ID NO: 6880 - RNA, 21 nt, synthetic construct
  misc_feature 1..21: note = Synthetic
  source 1..21: mol_type = other RNA
ccagtcacagtagcaacactg

SEQ ID NO: 6881 - RNA, 21 nt, synthetic construct
  misc_feature 1..21: note = Synthetic
  source 1..21: mol_type = other RNA
cagtcacagtagcaacactgc

SEQ ID NO: 6882 - RNA, 21 nt, synthetic construct
  misc_feature 1..21: note = Synthetic
  source 1..21: mol_type = other RNA
agtcacagtagcaacactgct

SEQ ID NO: 6883 - RNA, 21 nt, synthetic construct
  misc_feature 1..21: note = Synthetic
  source 1..21: mol_type = other RNA
gtcacagtagcaacactgctg

SEQ ID NO: 6884 - RNA, 21 nt, synthetic construct
  misc_feature 1..21: note = Synthetic
  source 1..21: mol_type = other RNA
tcacagtagcaacactgctgt

SEQ ID NO: 6885 - RNA, 21 nt, synthetic construct
  misc_feature 1..21: note = Synthetic
  source 1..21: mol_type = other RNA
cacagtagcaacactgctgtt

SEQ ID NO: 6886 - RNA, 21 nt, synthetic construct
  misc_feature 1..21: note = Synthetic
  source 1..21: mol_type = other RNA
acagtagcaacactgctgtta

SEQ ID NO: 6887 - RNA, 21 nt, synthetic construct
  misc_feature 1..21: note = Synthetic
  source 1..21: mol_type = other RNA
cagtagcaacactgctgttag

SEQ ID NO: 6888 - RNA, 21 nt, synthetic construct
  misc_feature 1..21: note = Synthetic
  source 1..21: mol_type = other RNA
agtagcaacactgctgttagc

SEQ ID NO: 6889 - RNA, 21 nt, synthetic construct
  misc_feature 1..21: note = Synthetic
  source 1..21: mol_type = other RNA
gtagcaacactgctgttagca

SEQ ID NO: 6890 - RNA, 21 nt, synthetic construct
  misc_feature 1..21: note = Synthetic
  source 1..21: mol_type = other RNA
tagcaacactgctgttagcat

SEQ ID NO: 6891 - RNA, 21 nt, synthetic construct
  misc_feature 1..21: note = Synthetic
  source 1..21: mol_type = other RNA
agcaacactgctgttagcatt

SEQ ID NO: 6892 - RNA, 21 nt, synthetic construct
  misc_feature 1..21: note = Synthetic
  source 1..21: mol_type = other RNA
gcaacactgctgttagcattc

SEQ ID NO: 6893 - RNA, 21 nt, synthetic construct
  misc_feature 1..21: note = Synthetic
  source 1..21: mol_type = other RNA
caacactgctgttagcattct

SEQ ID NO: 6894 - RNA, 21 nt, synthetic construct
  misc_feature 1..21: note = Synthetic
  source 1..21: mol_type = other RNA
aacactgctgttagcattctc

SEQ ID NO: 6895 - RNA, 21 nt, synthetic construct
  misc_feature 1..21: note = Synthetic
  source 1..21: mol_type = other RNA
acactgctgttagcattctcg

SEQ ID NO: 6896 - RNA, 21 nt, synthetic construct
  misc_feature 1..21: note = Synthetic
  source 1..21: mol_type = other RNA
cactgctgttagcattctcga

SEQ ID NO: 6897 - RNA, 21 nt, synthetic construct
  misc_feature 1..21: note = Synthetic
  source 1..21: mol_type = other RNA
actgctgttagcattctcgag

SEQ ID NO: 6898 - RNA, 21 nt, synthetic construct
  misc_feature 1..21: note = Synthetic
  source 1..21: mol_type = other RNA
ctgctgttagcattctcgagc

SEQ ID NO: 6899 - RNA, 21 nt, synthetic construct
  misc_feature 1..21: note = Synthetic
  source 1..21: mol_type = other RNA
tgctgttagcattctcgagct

SEQ ID NO: 6900 - RNA, 21 nt, synthetic construct
  misc_feature 1..21: note = Synthetic
  source 1..21: mol_type = other RNA
gctgttagcattctcgagctg

SEQ ID NO: 6901 - RNA, 21 nt, synthetic construct
  misc_feature 1..21: note = Synthetic
  source 1..21: mol_type = other RNA
ctgttagcattctcgagctgc

SEQ ID NO: 6902 - RNA, 21 nt, synthetic construct
  misc_feature 1..21: note = Synthetic
  source 1..21: mol_type = other RNA
tgttagcattctcgagctgca

SEQ ID NO: 6903 - RNA, 21 nt, synthetic construct
  misc_feature 1..21: note = Synthetic
  source 1..21: mol_type = other RNA
gttagcattctcgagctgcac

SEQ ID NO: 6904 - RNA, 21 nt, synthetic construct
  misc_feature 1..21: note = Synthetic
  source 1..21: mol_type = other RNA
ttagcattctcgagctgcacc

SEQ ID NO: 6905 - RNA, 21 nt, synthetic construct
  misc_feature 1..21: note = Synthetic
  source 1..21: mol_type = other RNA
tagcattctcgagctgcaccc

SEQ ID NO: 6906 - RNA, 21 nt, synthetic construct
  misc_feature 1..21: note = Synthetic
  source 1..21: mol_type = other RNA
agcattctcgagctgcacccc

SEQ ID NO: 6907 - RNA, 21 nt, synthetic construct
  misc_feature 1..21: note = Synthetic
  source 1..21: mol_type = other RNA
gcattctcgagctgcacccca

SEQ ID NO: 6908 - RNA, 21 nt, synthetic construct
  misc_feature 1..21: note = Synthetic
  source 1..21: mol_type = other RNA
cattctcgagctgcaccccat

SEQ ID NO: 6909 - RNA, 21 nt, synthetic construct
  misc_feature 1..21: note = Synthetic
  source 1..21: mol_type = other RNA
attctcgagctgcaccccatc

SEQ ID NO: 6910 - RNA, 21 nt, synthetic construct
  misc_feature 1..21: note = Synthetic
  source 1..21: mol_type = other RNA
ttctcgagctgcaccccatca

SEQ ID NO: 6911 - RNA, 21 nt, synthetic construct
  misc_feature 1..21: note = Synthetic
  source 1..21: mol_type = other RNA
tctcgagctgcaccccatcag

SEQ ID NO: 6912 - RNA, 21 nt, synthetic construct
  misc_feature 1..21: note = Synthetic
  source 1..21: mol_type = other RNA
ctcgagctgcaccccatcagg

SEQ ID NO: 6913 - RNA, 21 nt, synthetic construct
  misc_feature 1..21: note = Synthetic
  source 1..21: mol_type = other RNA
tcgagctgcaccccatcaggt

SEQ ID NO: 6914 - RNA, 21 nt, synthetic construct
  misc_feature 1..21: note = Synthetic
  source 1..21: mol_type = other RNA
cgagctgcaccccatcaggtc

SEQ ID NO: 6915 - RNA, 21 nt, synthetic construct
  misc_feature 1..21: note = Synthetic
  source 1..21: mol_type = other RNA
gagctgcaccccatcaggtcc

SEQ ID NO: 6916 - RNA, 21 nt, synthetic construct
  misc_feature 1..21: note = Synthetic
  source 1..21: mol_type = other RNA
agctgcaccccatcaggtccc

SEQ ID NO: 6917 - RNA, 21 nt, synthetic construct
  misc_feature 1..21: note = Synthetic
  source 1..21: mol_type = other RNA
gctgcaccccatcaggtccct

SEQ ID NO: 6918 - RNA, 21 nt, synthetic construct
  misc_feature 1..21: note = Synthetic
  source 1..21: mol_type = other RNA
ctgcaccccatcaggtccctg

SEQ ID NO: 6919 - RNA, 21 nt, synthetic construct
  misc_feature 1..21: note = Synthetic
  source 1..21: mol_type = other RNA
tgcaccccatcaggtccctgt

SEQ ID NO: 6920 - RNA, 21 nt, synthetic construct
  misc_feature 1..21: note = Synthetic
  source 1..21: mol_type = other RNA
gcaccccatcaggtccctgtg

SEQ ID NO: 6921 - RNA, 21 nt, synthetic construct
  misc_feature 1..21: note = Synthetic
  source 1..21: mol_type = other RNA
caccccatcaggtccctgtgt

SEQ ID NO: 6922 - RNA, 21 nt, synthetic construct
  misc_feature 1..21: note = Synthetic
  source 1..21: mol_type = other RNA
accccatcaggtccctgtgtt

SEQ ID NO: 6923 - RNA, 21 nt, synthetic construct
  misc_feature 1..21: note = Synthetic
  source 1..21: mol_type = other RNA
ccccatcaggtccctgtgttt

SEQ ID NO: 6924 - RNA, 21 nt, synthetic construct
  misc_feature 1..21: note = Synthetic
  source 1..21: mol_type = other RNA
cccatcaggtccctgtgtttt

SEQ ID NO: 6925 - RNA, 21 nt, synthetic construct
  misc_feature 1..21: note = Synthetic
  source 1..21: mol_type = other RNA
ccatcaggtccctgtgttttt

SEQ ID NO: 6926 - RNA, 21 nt, synthetic construct
  misc_feature 1..21: note = Synthetic
  source 1..21: mol_type = other RNA
catcaggtccctgtgtttttt

SEQ ID NO: 6927 - RNA, 21 nt, synthetic construct
  misc_feature 1..21: note = Synthetic
  source 1..21: mol_type = other RNA
atcaggtccctgtgttttttc

SEQ ID NO: 6928 - RNA, 21 nt, synthetic construct
  misc_feature 1..21: note = Synthetic
  source 1..21: mol_type = other RNA
tcaggtccctgtgttttttcc

SEQ ID NO: 6929 - RNA, 21 nt, synthetic construct
  misc_feature 1..21: note = Synthetic
  source 1..21: mol_type = other RNA
caggtccctgtgttttttccc

SEQ ID NO: 6930 - RNA, 21 nt, synthetic construct
  misc_feature 1..21: note = Synthetic
  source 1..21: mol_type = other RNA
aggtccctgtgttttttccca

SEQ ID NO: 6931 - RNA, 21 nt, synthetic construct
  misc_feature 1..21: note = Synthetic
  source 1..21: mol_type = other RNA
ggtccctgtgttttttcccag

SEQ ID NO: 6932 - RNA, 21 nt, synthetic construct
  misc_feature 1..21: note = Synthetic
  source 1..21: mol_type = other RNA
gtccctgtgttttttcccaga

SEQ ID NO: 6933 - RNA, 21 nt, synthetic construct
  misc_feature 1..21: note = Synthetic
  source 1..21: mol_type = other RNA
tccctgtgttttttcccagag

SEQ ID NO: 6934 - RNA, 21 nt, synthetic construct
  misc_feature 1..21: note = Synthetic
  source 1..21: mol_type = other RNA
ccctgtgttttttcccagaga

SEQ ID NO: 6935 - RNA, 21 nt, synthetic construct
  misc_feature 1..21: note = Synthetic
  source 1..21: mol_type = other RNA
cctgtgttttttcccagagat

SEQ ID NO: 6936 - RNA, 21 nt, synthetic construct
  misc_feature 1..21: note = Synthetic
  source 1..21: mol_type = other RNA
ctgtgttttttcccagagata

SEQ ID NO: 6937 - RNA, 21 nt, synthetic construct
  misc_feature 1..21: note = Synthetic
  source 1..21: mol_type = other RNA
tgtgttttttcccagagatat

SEQ ID NO: 6938 - RNA, 21 nt, synthetic construct
  misc_feature 1..21: note = Synthetic
  source 1..21: mol_type = other RNA
gtgttttttcccagagatatg

SEQ ID NO: 6939 - RNA, 21 nt, synthetic construct
  misc_feature 1..21: note = Synthetic
  source 1..21: mol_type = other RNA
tgttttttcccagagatatga

SEQ ID NO: 6940 - RNA, 21 nt, synthetic construct
  misc_feature 1..21: note = Synthetic
  source 1..21: mol_type = other RNA
gttttttcccagagatatgag

SEQ ID NO: 6941 - RNA, 21 nt, synthetic construct
  misc_feature 1..21: note = Synthetic
  source 1..21: mol_type = other RNA
ttttttcccagagatatgaga

SEQ ID NO: 6942 - RNA, 21 nt, synthetic construct
  misc_feature 1..21: note = Synthetic
  source 1..21: mol_type = other RNA
tttttcccagagatatgagat

SEQ ID NO: 6943 - RNA, 21 nt, synthetic construct
  misc_feature 1..21: note = Synthetic
  source 1..21: mol_type = other RNA
ttttcccagagatatgagata

SEQ ID NO: 6944 - RNA, 21 nt, synthetic construct
  misc_feature 1..21: note = Synthetic
  source 1..21: mol_type = other RNA
tttcccagagatatgagataa

SEQ ID NO: 6945 - RNA, 21 nt, synthetic construct
  misc_feature 1..21: note = Synthetic
  source 1..21: mol_type = other RNA
ttcccagagatatgagataat

SEQ ID NO: 6946 - RNA, 21 nt, synthetic construct
  misc_feature 1..21: note = Synthetic
  source 1..21: mol_type = other RNA
tcccagagatatgagataatt

SEQ ID NO: 6947 - RNA, 21 nt, synthetic construct
  misc_feature 1..21: note = Synthetic
  source 1..21: mol_type = other RNA
cccagagatatgagataattt

SEQ ID NO: 6948 - RNA, 21 nt, synthetic construct
  misc_feature 1..21: note = Synthetic
  source 1..21: mol_type = other RNA
ccagagatatgagataatttt

SEQ ID NO: 6949 - RNA, 21 nt, synthetic construct
  misc_feature 1..21: note = Synthetic
  source 1..21: mol_type = other RNA
cagagatatgagataattttc

SEQ ID NO: 6950 - RNA, 21 nt, synthetic construct
  misc_feature 1..21: note = Synthetic
  source 1..21: mol_type = other RNA
agagatatgagataattttct

SEQ ID NO: 6951 - RNA, 21 nt, synthetic construct
  misc_feature 1..21: note = Synthetic
  source 1..21: mol_type = other RNA
gagatatgagataattttctg

SEQ ID NO: 6952 - RNA, 21 nt, synthetic construct
  misc_feature 1..21: note = Synthetic
  source 1..21: mol_type = other RNA
agatatgagataattttctga

SEQ ID NO: 6953 - RNA, 21 nt, synthetic construct
  misc_feature 1..21: note = Synthetic
  source 1..21: mol_type = other RNA
gatatgagataattttctgat

SEQ ID NO: 6954 - RNA, 21 nt, synthetic construct
  misc_feature 1..21: note = Synthetic
  source 1..21: mol_type = other RNA
atatgagataattttctgatc

SEQ ID NO: 6955 - RNA, 21 nt, synthetic construct
  misc_feature 1..21: note = Synthetic
  source 1..21: mol_type = other RNA
tatgagataattttctgatca

SEQ ID NO: 6956 - RNA, 21 nt, synthetic construct
  misc_feature 1..21: note = Synthetic
  source 1..21: mol_type = other RNA
atgagataattttctgatcat

SEQ ID NO: 6957 - RNA, 21 nt, synthetic construct
  misc_feature 1..21: note = Synthetic
  source 1..21: mol_type = other RNA
tgagataattttctgatcatc

SEQ ID NO: 6958 - RNA, 21 nt, synthetic construct
  misc_feature 1..21: note = Synthetic
  source 1..21: mol_type = other RNA
gagataattttctgatcatct

SEQ ID NO: 6959 - RNA, 21 nt, synthetic construct
  misc_feature 1..21: note = Synthetic
  source 1..21: mol_type = other RNA
agataattttctgatcatctg

SEQ ID NO: 6960 - RNA, 21 nt, synthetic construct
  misc_feature 1..21: note = Synthetic
  source 1..21: mol_type = other RNA
gataattttctgatcatctga

SEQ ID NO: 6961 - RNA, 21 nt, synthetic construct
  misc_feature 1..21: note = Synthetic
  source 1..21: mol_type = other RNA
ataattttctgatcatctgag

SEQ ID NO: 6962 - RNA, 21 nt, synthetic construct
  misc_feature 1..21: note = Synthetic
  source 1..21: mol_type = other RNA
taattttctgatcatctgagc

SEQ ID NO: 6963 - RNA, 21 nt, synthetic construct
  misc_feature 1..21: note = Synthetic
  source 1..21: mol_type = other RNA
aattttctgatcatctgagct

SEQ ID NO: 6964 - RNA, 21 nt, synthetic construct
  misc_feature 1..21: note = Synthetic
  source 1..21: mol_type = other RNA
attttctgatcatctgagctc

SEQ ID NO: 6965 - RNA, 21 nt, synthetic construct
  misc_feature 1..21: note = Synthetic
  source 1..21: mol_type = other RNA
ttttctgatcatctgagctct

SEQ ID NO: 6966 - RNA, 21 nt, synthetic construct
  misc_feature 1..21: note = Synthetic
  source 1..21: mol_type = other RNA
tttctgatcatctgagctctt

SEQ ID NO: 6967 - RNA, 21 nt, synthetic construct
  misc_feature 1..21: note = Synthetic
  source 1..21: mol_type = other RNA
ttctgatcatctgagctcttg

SEQ ID NO: 6968 - RNA, 21 nt, synthetic construct
  misc_feature 1..21: note = Synthetic
  source 1..21: mol_type = other RNA
tctgatcatctgagctcttgc

SEQ ID NO: 6969 - RNA, 21 nt, synthetic construct
  misc_feature 1..21: note = Synthetic
  source 1..21: mol_type = other RNA
ctgatcatctgagctcttgct

SEQ ID NO: 6970 - RNA, 21 nt, synthetic construct
  misc_feature 1..21: note = Synthetic
  source 1..21: mol_type = other RNA
tgatcatctgagctcttgctg

SEQ ID NO: 6971 - RNA, 21 nt, synthetic construct
  misc_feature 1..21: note = Synthetic
  source 1..21: mol_type = other RNA
gatcatctgagctcttgctgc

SEQ ID NO: 6972 - RNA, 21 nt, synthetic construct
  misc_feature 1..21: note = Synthetic
  source 1..21: mol_type = other RNA
atcatctgagctcttgctgcc

SEQ ID NO: 6973 - RNA, 21 nt, synthetic construct
  misc_feature 1..21: note = Synthetic
  source 1..21: mol_type = other RNA
tcatctgagctcttgctgcca

SEQ ID NO: 6974 - RNA, 21 nt, synthetic construct
  misc_feature 1..21: note = Synthetic
  source 1..21: mol_type = other RNA
catctgagctcttgctgccat

SEQ ID NO: 6975 - RNA, 21 nt, synthetic construct
  misc_feature 1..21: note = Synthetic
  source 1..21: mol_type = other RNA
atctgagctcttgctgccatc

SEQ ID NO: 6976 - RNA, 21 nt, synthetic construct
  misc_feature 1..21: note = Synthetic
  source 1..21: mol_type = other RNA
tctgagctcttgctgccatcc

SEQ ID NO: 6977 - RNA, 21 nt, synthetic construct
  misc_feature 1..21: note = Synthetic
  source 1..21: mol_type = other RNA
ctgagctcttgctgccatcca

SEQ ID NO: 6978 - RNA, 21 nt, synthetic construct
  misc_feature 1..21: note = Synthetic
  source 1..21: mol_type = other RNA
tgagctcttgctgccatccag

SEQ ID NO: 6979 - RNA, 21 nt, synthetic construct
  misc_feature 1..21: note = Synthetic
  source 1..21: mol_type = other RNA
gagctcttgctgccatccagg

SEQ ID NO: 6980 - RNA, 21 nt, synthetic construct
  misc_feature 1..21: note = Synthetic
  source 1..21: mol_type = other RNA
agctcttgctgccatccaggg

SEQ ID NO: 6981 - RNA, 21 nt, synthetic construct
  misc_feature 1..21: note = Synthetic
  source 1..21: mol_type = other RNA
gctcttgctgccatccagggt

SEQ ID NO: 6982 - RNA, 21 nt, synthetic construct
  misc_feature 1..21: note = Synthetic
  source 1..21: mol_type = other RNA
ctcttgctgccatccagggtt

SEQ ID NO: 6983 - RNA, 21 nt, synthetic construct
  misc_feature 1..21: note = Synthetic
  source 1..21: mol_type = other RNA
tcttgctgccatccagggttg

SEQ ID NO: 6984 - RNA, 21 nt, synthetic construct
  misc_feature 1..21: note = Synthetic
  source 1..21: mol_type = other RNA
cttgctgccatccagggttgt

SEQ ID NO: 6985 - RNA, 21 nt, synthetic construct
  misc_feature 1..21: note = Synthetic
  source 1..21: mol_type = other RNA
ttgctgccatccagggttgtg

SEQ ID NO: 6986 - RNA, 21 nt, synthetic construct
  misc_feature 1..21: note = Synthetic
  source 1..21: mol_type = other RNA
tgctgccatccagggttgtgc

SEQ ID NO: 6987 - RNA, 21 nt, synthetic construct
  misc_feature 1..21: note = Synthetic
  source 1..21: mol_type = other RNA
gctgccatccagggttgtgct

SEQ ID NO: 6988 - RNA, 21 nt, synthetic construct
  misc_feature 1..21: note = Synthetic
  source 1..21: mol_type = other RNA
ctgccatccagggttgtgcta

SEQ ID NO: 6989 - RNA, 21 nt, synthetic construct
  misc_feature 1..21: note = Synthetic
  source 1..21: mol_type = other RNA
tgccatccagggttgtgctat

SEQ ID NO: 6990 - RNA, 21 nt, synthetic construct
  misc_feature 1..21: note = Synthetic
  source 1..21: mol_type = other RNA
gccatccagggttgtgctatc

SEQ ID NO: 6991 - RNA, 21 nt, synthetic construct
  misc_feature 1..21: note = Synthetic
  source 1..21: mol_type = other RNA
ccatccagggttgtgctatcc

SEQ ID NO: 6992 - RNA, 21 nt, synthetic construct
  misc_feature 1..21: note = Synthetic
  source 1..21: mol_type = other RNA
catccagggttgtgctatcca

SEQ ID NO: 6993 - RNA, 21 nt, synthetic construct
  misc_feature 1..21: note = Synthetic
  source 1..21: mol_type = other RNA
atccagggttgtgctatccac

SEQ ID NO: 6994 - RNA, 21 nt, synthetic construct
  misc_feature 1..21: note = Synthetic
  source 1..21: mol_type = other RNA
tccagggttgtgctatccaca

SEQ ID NO: 6995 - RNA, 21 nt, synthetic construct
  misc_feature 1..21: note = Synthetic
  source 1..21: mol_type = other RNA
ccagggttgtgctatccacag

SEQ ID NO: 6996 - RNA, 21 nt, synthetic construct
  misc_feature 1..21: note = Synthetic
  source 1..21: mol_type = other RNA
cagggttgtgctatccacagg

SEQ ID NO: 6997 - RNA, 21 nt, synthetic construct
  misc_feature 1..21: note = Synthetic
  source 1..21: mol_type = other RNA
agggttgtgctatccacagga

SEQ ID NO: 6998 - RNA, 21 nt, synthetic construct
  misc_feature 1..21: note = Synthetic
  source 1..21: mol_type = other RNA
gggttgtgctatccacaggaa

SEQ ID NO: 6999 - RNA, 21 nt, synthetic construct
  misc_feature 1..21: note = Synthetic
  source 1..21: mol_type = other RNA
ggttgtgctatccacaggaag

SEQ ID NO: 7000 - RNA, 21 nt, synthetic construct
  misc_feature 1..21: note = Synthetic
  source 1..21: mol_type = other RNA
gttgtgctatccacaggaagg

SEQ ID NO: 7001 - RNA, 21 nt, synthetic construct
  misc_feature 1..21: note = Synthetic
  source 1..21: mol_type = other RNA
ttgtgctatccacaggaaggg

SEQ ID NO: 7002 - RNA, 21 nt, synthetic construct
  misc_feature 1..21: note = Synthetic
  source 1..21: mol_type = other RNA
tgtgctatccacaggaagggt

SEQ ID NO: 7003 - RNA, 21 nt, synthetic construct
  misc_feature 1..21: note = Synthetic
  source 1..21: mol_type = other RNA
gtgctatccacaggaagggtc

SEQ ID NO: 7004 - RNA, 21 nt, synthetic construct
  misc_feature 1..21: note = Synthetic
  source 1..21: mol_type = other RNA
tgctatccacaggaagggtca

SEQ ID NO: 7005 - RNA, 21 nt, synthetic construct
  misc_feature 1..21: note = Synthetic
  source 1..21: mol_type = other RNA
gctatccacaggaagggtcag

SEQ ID NO: 7006 - RNA, 21 nt, synthetic construct
  misc_feature 1..21: note = Synthetic
  source 1..21: mol_type = other RNA
ctatccacaggaagggtcagc

SEQ ID NO: 7007 - RNA, 21 nt, synthetic construct
  misc_feature 1..21: note = Synthetic
  source 1..21: mol_type = other RNA
tatccacaggaagggtcagct

SEQ ID NO: 7008 - RNA, 21 nt, synthetic construct
  misc_feature 1..21: note = Synthetic
  source 1..21: mol_type = other RNA
atccacaggaagggtcagctc

SEQ ID NO: 7009 - RNA, 21 nt, synthetic construct
  misc_feature 1..21: note = Synthetic
  source 1..21: mol_type = other RNA
tccacaggaagggtcagctct

SEQ ID NO: 7010 - RNA, 21 nt, synthetic construct
  misc_feature 1..21: note = Synthetic
  source 1..21: mol_type = other RNA
ccacaggaagggtcagctctt

SEQ ID NO: 7011 - RNA, 21 nt, synthetic construct
  misc_feature 1..21: note = Synthetic
  source 1..21: mol_type = other RNA
cacaggaagggtcagctcttt

SEQ ID NO: 7012 - RNA, 21 nt, synthetic construct
  misc_feature 1..21: note = Synthetic
  source 1..21: mol_type = other RNA
acaggaagggtcagctcttta

SEQ ID NO: 7013 - RNA, 21 nt, synthetic construct
  misc_feature 1..21: note = Synthetic
  source 1..21: mol_type = other RNA
caggaagggtcagctctttat

SEQ ID NO: 7014 - RNA, 21 nt, synthetic construct
  misc_feature 1..21: note = Synthetic
  source 1..21: mol_type = other RNA
aggaagggtcagctctttatc

SEQ ID NO: 7015 - RNA, 21 nt, synthetic construct
  misc_feature 1..21: note = Synthetic
  source 1..21: mol_type = other RNA
ggaagggtcagctctttatct

SEQ ID NO: 7016 - RNA, 21 nt, synthetic construct
  misc_feature 1..21: note = Synthetic
  source 1..21: mol_type = other RNA
gaagggtcagctctttatctg

SEQ ID NO: 7017 - RNA, 21 nt, synthetic construct
  misc_feature 1..21: note = Synthetic
  source 1..21: mol_type = other RNA
aagggtcagctctttatctgg

SEQ ID NO: 7018 - RNA, 21 nt, synthetic construct
  misc_feature 1..21: note = Synthetic
  source 1..21: mol_type = other RNA
agggtcagctctttatctggg

SEQ ID NO: 7019 - RNA, 21 nt, synthetic construct
  misc_feature 1..21: note = Synthetic
  source 1..21: mol_type = other RNA
gggtcagctctttatctgggc

SEQ ID NO: 7020 - RNA, 21 nt, synthetic construct
  misc_feature 1..21: note = Synthetic
  source 1..21: mol_type = other RNA
ggtcagctctttatctgggcc

SEQ ID NO: 7021 - RNA, 21 nt, synthetic construct
  misc_feature 1..21: note = Synthetic
  source 1..21: mol_type = other RNA
gtcagctctttatctgggcct

SEQ ID NO: 7022 - RNA, 21 nt, synthetic construct
  misc_feature 1..21: note = Synthetic
  source 1..21: mol_type = other RNA
tcagctctttatctgggcctg

SEQ ID NO: 7023 - RNA, 21 nt, synthetic construct
  misc_feature 1..21: note = Synthetic
  source 1..21: mol_type = other RNA
cagctctttatctgggcctgc

SEQ ID NO: 7024 - RNA, 21 nt, synthetic construct
  misc_feature 1..21: note = Synthetic
  source 1..21: mol_type = other RNA
agctctttatctgggcctgca

SEQ ID NO: 7025 - RNA, 21 nt, synthetic construct
  misc_feature 1..21: note = Synthetic
  source 1..21: mol_type = other RNA
gctctttatctgggcctgcat

SEQ ID NO: 7026 - RNA, 21 nt, synthetic construct
  misc_feature 1..21: note = Synthetic
  source 1..21: mol_type = other RNA
ctctttatctgggcctgcatc

SEQ ID NO: 7027 - RNA, 21 nt, synthetic construct
  misc_feature 1..21: note = Synthetic
  source 1..21: mol_type = other RNA
tctttatctgggcctgcatct

SEQ ID NO: 7028 - RNA, 21 nt, synthetic construct
  misc_feature 1..21: note = Synthetic
  source 1..21: mol_type = other RNA
ctttatctgggcctgcatctg

SEQ ID NO: 7029 - RNA, 21 nt, synthetic construct
  misc_feature 1..21: note = Synthetic
  source 1..21: mol_type = other RNA
tttatctgggcctgcatctgc

SEQ ID NO: 7030 - RNA, 21 nt, synthetic construct
  misc_feature 1..21: note = Synthetic
  source 1..21: mol_type = other RNA
ttatctgggcctgcatctgcc

SEQ ID NO: 7031 - RNA, 21 nt, synthetic construct
  misc_feature 1..21: note = Synthetic
  source 1..21: mol_type = other RNA
tatctgggcctgcatctgcct

SEQ ID NO: 7032 - RNA, 21 nt, synthetic construct
  misc_feature 1..21: note = Synthetic
  source 1..21: mol_type = other RNA
atctgggcctgcatctgcctg

SEQ ID NO: 7033 - RNA, 21 nt, synthetic construct
  misc_feature 1..21: note = Synthetic
  source 1..21: mol_type = other RNA
tctgggcctgcatctgcctga

SEQ ID NO: 7034 - RNA, 21 nt, synthetic construct
  misc_feature 1..21: note = Synthetic
  source 1..21: mol_type = other RNA
ctgggcctgcatctgcctgag

SEQ ID NO: 7035 - RNA, 21 nt, synthetic construct
  misc_feature 1..21: note = Synthetic
  source 1..21: mol_type = other RNA
tgggcctgcatctgcctgagg

SEQ ID NO: 7036 - RNA, 21 nt, synthetic construct
  misc_feature 1..21: note = Synthetic
  source 1..21: mol_type = other RNA
gggcctgcatctgcctgagga

SEQ ID NO: 7037 - RNA, 21 nt, synthetic construct
  misc_feature 1..21: note = Synthetic
  source 1..21: mol_type = other RNA
ggcctgcatctgcctgaggag

SEQ ID NO: 7038 - RNA, 21 nt, synthetic construct
  misc_feature 1..21: note = Synthetic
  source 1..21: mol_type = other RNA
gcctgcatctgcctgaggagg

SEQ ID NO: 7039 - RNA, 21 nt, synthetic construct
  misc_feature 1..21: note = Synthetic
  source 1..21: mol_type = other RNA
cctgcatctgcctgaggaggc

SEQ ID NO: 7040 - RNA, 21 nt, synthetic construct
  misc_feature 1..21: note = Synthetic
  source 1..21: mol_type = other RNA
ctgcatctgcctgaggaggct

SEQ ID NO: 7041 - RNA, 21 nt, synthetic construct
  misc_feature 1..21: note = Synthetic
  source 1..21: mol_type = other RNA
tgcatctgcctgaggaggctt

SEQ ID NO: 7042 - RNA, 21 nt, synthetic construct
  misc_feature 1..21: note = Synthetic
  source 1..21: mol_type = other RNA
gcatctgcctgaggaggctta

SEQ ID NO: 7043 - RNA, 21 nt, synthetic construct
  misc_feature 1..21: note = Synthetic
  source 1..21: mol_type = other RNA
catctgcctgaggaggcttat

SEQ ID NO: 7044 - RNA, 21 nt, synthetic construct
  misc_feature 1..21: note = Synthetic
  source 1..21: mol_type = other RNA
atctgcctgaggaggcttatt

SEQ ID NO: 7045 - RNA, 21 nt, synthetic construct
  misc_feature 1..21: note = Synthetic
  source 1..21: mol_type = other RNA
tctgcctgaggaggcttattg

SEQ ID NO: 7046 - RNA, 21 nt, synthetic construct
  misc_feature 1..21: note = Synthetic
  source 1..21: mol_type = other RNA
ctgcctgaggaggcttattgt

SEQ ID NO: 7047 - RNA, 21 nt, synthetic construct
  misc_feature 1..21: note = Synthetic
  source 1..21: mol_type = other RNA
tgcctgaggaggcttattgtt

SEQ ID NO: 7048 - RNA, 21 nt, synthetic construct
  misc_feature 1..21: note = Synthetic
  source 1..21: mol_type = other RNA
gcctgaggaggcttattgttt

SEQ ID NO: 7049 - RNA, 21 nt, synthetic construct
  misc_feature 1..21: note = Synthetic
  source 1..21: mol_type = other RNA
cctgaggaggcttattgtttt

SEQ ID NO: 7050 - RNA, 21 nt, synthetic construct
  misc_feature 1..21: note = Synthetic
  source 1..21: mol_type = other RNA
ctgaggaggcttattgttttc

SEQ ID NO: 7051 - RNA, 21 nt, synthetic construct
  misc_feature 1..21: note = Synthetic
  source 1..21: mol_type = other RNA
tgaggaggcttattgttttca

SEQ ID NO: 7052 - RNA, 21 nt, synthetic construct
  misc_feature 1..21: note = Synthetic
  source 1..21: mol_type = other RNA
gaggaggcttattgttttcag

SEQ ID NO: 7053 - RNA, 21 nt, synthetic construct
  misc_feature 1..21: note = Synthetic
  source 1..21: mol_type = other RNA
aggaggcttattgttttcagg

SEQ ID NO: 7054 - RNA, 21 nt, synthetic construct
  misc_feature 1..21: note = Synthetic
  source 1..21: mol_type = other RNA
ggaggcttattgttttcaggt

SEQ ID NO: 7055 - RNA, 21 nt, synthetic construct
  misc_feature 1..21: note = Synthetic
  source 1..21: mol_type = other RNA
gaggcttattgttttcaggtt

SEQ ID NO: 7056 - RNA, 21 nt, synthetic construct
  misc_feature 1..21: note = Synthetic
  source 1..21: mol_type = other RNA
aggcttattgttttcaggttg

SEQ ID NO: 7057 - RNA, 21 nt, synthetic construct
  misc_feature 1..21: note = Synthetic
  source 1..21: mol_type = other RNA
ggcttattgttttcaggttgc

SEQ ID NO: 7058 - RNA, 21 nt, synthetic construct
  misc_feature 1..21: note = Synthetic
  source 1..21: mol_type = other RNA
gcttattgttttcaggttgca

SEQ ID NO: 7059 - RNA, 21 nt, synthetic construct
  misc_feature 1..21: note = Synthetic
  source 1..21: mol_type = other RNA
cttattgttttcaggttgcac

SEQ ID NO: 7060 - RNA, 21 nt, synthetic construct
  misc_feature 1..21: note = Synthetic
  source 1..21: mol_type = other RNA
ttattgttttcaggttgcaca

SEQ ID NO: 7061 - RNA, 21 nt, synthetic construct
  misc_feature 1..21: note = Synthetic
  source 1..21: mol_type = other RNA
tattgttttcaggttgcacaa

SEQ ID NO: 7062 - RNA, 21 nt, synthetic construct
  misc_feature 1..21: note = Synthetic
  source 1..21: mol_type = other RNA
attgttttcaggttgcacaat

SEQ ID NO: 7063 - RNA, 21 nt, synthetic construct
  misc_feature 1..21: note = Synthetic
  source 1..21: mol_type = other RNA
ttgttttcaggttgcacaata

SEQ ID NO: 7064 - RNA, 21 nt, synthetic construct
  misc_feature 1..21: note = Synthetic
  source 1..21: mol_type = other RNA
tgttttcaggttgcacaataa

SEQ ID NO: 7065 - RNA, 21 nt, synthetic construct
  misc_feature 1..21: note = Synthetic
  source 1..21: mol_type = other RNA
gttttcaggttgcacaataac

SEQ ID NO: 7066 - RNA, 21 nt, synthetic construct
  misc_feature 1..21: note = Synthetic
  source 1..21: mol_type = other RNA
ttttcaggttgcacaataaca

SEQ ID NO: 7067 - RNA, 21 nt, synthetic construct
  misc_feature 1..21: note = Synthetic
  source 1..21: mol_type = other RNA
tttcaggttgcacaataacag

SEQ ID NO: 7068 - RNA, 21 nt, synthetic construct
  misc_feature 1..21: note = Synthetic
  source 1..21: mol_type = other RNA
ttcaggttgcacaataacagt

SEQ ID NO: 7069 - RNA, 21 nt, synthetic construct
  misc_feature 1..21: note = Synthetic
  source 1..21: mol_type = other RNA
tcaggttgcacaataacagtc

SEQ ID NO: 7070 - RNA, 21 nt, synthetic construct
  misc_feature 1..21: note = Synthetic
  source 1..21: mol_type = other RNA
caggttgcacaataacagtca

SEQ ID NO: 7071 - RNA, 21 nt, synthetic construct
  misc_feature 1..21: note = Synthetic
  source 1..21: mol_type = other RNA
aggttgcacaataacagtcac

SEQ ID NO: 7072 - RNA, 21 nt, synthetic construct
  misc_feature 1..21: note = Synthetic
  source 1..21: mol_type = other RNA
ggttgcacaataacagtcact

SEQ ID NO: 7073 - RNA, 21 nt, synthetic construct
  misc_feature 1..21: note = Synthetic
  source 1..21: mol_type = other RNA
gttgcacaataacagtcactt

SEQ ID NO: 7074 - RNA, 21 nt, synthetic construct
  misc_feature 1..21: note = Synthetic
  source 1..21: mol_type = other RNA
ttgcacaataacagtcacttg

SEQ ID NO: 7075 - RNA, 21 nt, synthetic construct
  misc_feature 1..21: note = Synthetic
  source 1..21: mol_type = other RNA
tgcacaataacagtcacttga

SEQ ID NO: 7076 - RNA, 21 nt, synthetic construct
  misc_feature 1..21: note = Synthetic
  source 1..21: mol_type = other RNA
gcacaataacagtcacttgag

SEQ ID NO: 7077 - RNA, 21 nt, synthetic construct
  misc_feature 1..21: note = Synthetic
  source 1..21: mol_type = other RNA
cacaataacagtcacttgagc

SEQ ID NO: 7078 - RNA, 21 nt, synthetic construct
  misc_feature 1..21: note = Synthetic
  source 1..21: mol_type = other RNA
acaataacagtcacttgagca

SEQ ID NO: 7079 - RNA, 21 nt, synthetic construct
  misc_feature 1..21: note = Synthetic
  source 1..21: mol_type = other RNA
caataacagtcacttgagcag

SEQ ID NO: 7080 - RNA, 21 nt, synthetic construct
  misc_feature 1..21: note = Synthetic
  source 1..21: mol_type = other RNA
aataacagtcacttgagcagt

SEQ ID NO: 7081 - RNA, 21 nt, synthetic construct
  misc_feature 1..21: note = Synthetic
  source 1..21: mol_type = other RNA
ataacagtcacttgagcagtg

SEQ ID NO: 7082 - RNA, 21 nt, synthetic construct
  misc_feature 1..21: note = Synthetic
  source 1..21: mol_type = other RNA
taacagtcacttgagcagtgg

SEQ ID NO: 7083 - RNA, 21 nt, synthetic construct
  misc_feature 1..21: note = Synthetic
  source 1..21: mol_type = other RNA
aacagtcacttgagcagtggc

SEQ ID NO: 7084 - RNA, 21 nt, synthetic construct
  misc_feature 1..21: note = Synthetic
  source 1..21: mol_type = other RNA
acagtcacttgagcagtggcc

SEQ ID NO: 7085 - RNA, 21 nt, synthetic construct
  misc_feature 1..21: note = Synthetic
  source 1..21: mol_type = other RNA
cagtcacttgagcagtggcct

SEQ ID NO: 7086 - RNA, 21 nt, synthetic construct
  misc_feature 1..21: note = Synthetic
  source 1..21: mol_type = other RNA
agtcacttgagcagtggcctg

SEQ ID NO: 7087 - RNA, 21 nt, synthetic construct
  misc_feature 1..21: note = Synthetic
  source 1..21: mol_type = other RNA
gtcacttgagcagtggcctgc

SEQ ID NO: 7088 - RNA, 21 nt, synthetic construct
  misc_feature 1..21: note = Synthetic
  source 1..21: mol_type = other RNA
tcacttgagcagtggcctgct

SEQ ID NO: 7089 - RNA, 21 nt, synthetic construct
  misc_feature 1..21: note = Synthetic
  source 1..21: mol_type = other RNA
cacttgagcagtggcctgctg

SEQ ID NO: 7090 - RNA, 21 nt, synthetic construct
  misc_feature 1..21: note = Synthetic
  source 1..21: mol_type = other RNA
acttgagcagtggcctgctgt

SEQ ID NO: 7091 - RNA, 21 nt, synthetic construct
  misc_feature 1..21: note = Synthetic
  source 1..21: mol_type = other RNA
cttgagcagtggcctgctgtc

SEQ ID NO: 7092 - RNA, 21 nt, synthetic construct
  misc_feature 1..21: note = Synthetic
  source 1..21: mol_type = other RNA
ttgagcagtggcctgctgtcc

SEQ ID NO: 7093 - RNA, 21 nt, synthetic construct
  misc_feature 1..21: note = Synthetic
  source 1..21: mol_type = other RNA
tgagcagtggcctgctgtcct

SEQ ID NO: 7094 - RNA, 21 nt, synthetic construct
  misc_feature 1..21: note = Synthetic
  source 1..21: mol_type = other RNA
gagcagtggcctgctgtccta

SEQ ID NO: 7095 - RNA, 21 nt, synthetic construct
  misc_feature 1..21: note = Synthetic
  source 1..21: mol_type = other RNA
agcagtggcctgctgtcctat

SEQ ID NO: 7096 - RNA, 21 nt, synthetic construct
  misc_feature 1..21: note = Synthetic
  source 1..21: mol_type = other RNA
gcagtggcctgctgtcctatt

SEQ ID NO: 7097 - RNA, 21 nt, synthetic construct
  misc_feature 1..21: note = Synthetic
  source 1..21: mol_type = other RNA
cagtggcctgctgtcctattg

SEQ ID NO: 7098 - RNA, 21 nt, synthetic construct
  misc_feature 1..21: note = Synthetic
  source 1..21: mol_type = other RNA
agtggcctgctgtcctattgt

SEQ ID NO: 7099 - RNA, 21 nt, synthetic construct
  misc_feature 1..21: note = Synthetic
  source 1..21: mol_type = other RNA
gtggcctgctgtcctattgtg

SEQ ID NO: 7100 - RNA, 21 nt, synthetic construct
  misc_feature 1..21: note = Synthetic
  source 1..21: mol_type = other RNA
tggcctgctgtcctattgtgt

SEQ ID NO: 7101 - RNA, 21 nt, synthetic construct
  misc_feature 1..21: note = Synthetic
  source 1..21: mol_type = other RNA
ggcctgctgtcctattgtgtc

SEQ ID NO: 7102 - RNA, 21 nt, synthetic construct
  misc_feature 1..21: note = Synthetic
  source 1..21: mol_type = other RNA
gcctgctgtcctattgtgtca

SEQ ID NO: 7103 - RNA, 21 nt, synthetic construct
  misc_feature 1..21: note = Synthetic
  source 1..21: mol_type = other RNA
cctgctgtcctattgtgtcag

SEQ ID NO: 7104 - RNA, 21 nt, synthetic construct
  misc_feature 1..21: note = Synthetic
  source 1..21: mol_type = other RNA
ctgctgtcctattgtgtcagt

SEQ ID NO: 7105 - RNA, 21 nt, synthetic construct
  misc_feature 1..21: note = Synthetic
  source 1..21: mol_type = other RNA
tgctgtcctattgtgtcagtc

SEQ ID NO: 7106 - RNA, 21 nt, synthetic construct
  misc_feature 1..21: note = Synthetic
  source 1..21: mol_type = other RNA
gctgtcctattgtgtcagtca

SEQ ID NO: 7107 - RNA, 21 nt, synthetic construct
  misc_feature 1..21: note = Synthetic
  source 1..21: mol_type = other RNA
ctgtcctattgtgtcagtcac

SEQ ID NO: 7108 - RNA, 21 nt, synthetic construct
  misc_feature 1..21: note = Synthetic
  source 1..21: mol_type = other RNA
tgtcctattgtgtcagtcact

SEQ ID NO: 7109 - RNA, 21 nt, synthetic construct
  misc_feature 1..21: note = Synthetic
  source 1..21: mol_type = other RNA
gtcctattgtgtcagtcactg

SEQ ID NO: 7110 - RNA, 21 nt, synthetic construct
  misc_feature 1..21: note = Synthetic
  source 1..21: mol_type = other RNA
tcctattgtgtcagtcactgt

SEQ ID NO: 7111 - RNA, 21 nt, synthetic construct
  misc_feature 1..21: note = Synthetic
  source 1..21: mol_type = other RNA
cctattgtgtcagtcactgtg

SEQ ID NO: 7112 - RNA, 21 nt, synthetic construct
  misc_feature 1..21: note = Synthetic
  source 1..21: mol_type = other RNA
ctattgtgtcagtcactgtga

SEQ ID NO: 7113 - RNA, 21 nt, synthetic construct
  misc_feature 1..21: note = Synthetic
  source 1..21: mol_type = other RNA
tattgtgtcagtcactgtgag

SEQ ID NO: 7114 - RNA, 21 nt, synthetic construct
  misc_feature 1..21: note = Synthetic
  source 1..21: mol_type = other RNA
attgtgtcagtcactgtgagc

SEQ ID NO: 7115 - RNA, 21 nt, synthetic construct
  misc_feature 1..21: note = Synthetic
  source 1..21: mol_type = other RNA
ttgtgtcagtcactgtgagct

SEQ ID NO: 7116 - RNA, 21 nt, synthetic construct
  misc_feature 1..21: note = Synthetic
  source 1..21: mol_type = other RNA
tgtgtcagtcactgtgagctg

SEQ ID NO: 7117 - RNA, 21 nt, synthetic construct
  misc_feature 1..21: note = Synthetic
  source 1..21: mol_type = other RNA
gtgtcagtcactgtgagctgg

SEQ ID NO: 7118 - RNA, 21 nt, synthetic construct
  misc_feature 1..21: note = Synthetic
  source 1..21: mol_type = other RNA
tgtcagtcactgtgagctggt

SEQ ID NO: 7119 - RNA, 21 nt, synthetic construct
  misc_feature 1..21: note = Synthetic
  source 1..21: mol_type = other RNA
gtcagtcactgtgagctggta

SEQ ID NO: 7120 - RNA, 21 nt, synthetic construct
  misc_feature 1..21: note = Synthetic
  source 1..21: mol_type = other RNA
tcagtcactgtgagctggtaa

SEQ ID NO: 7121 - RNA, 21 nt, synthetic construct
  misc_feature 1..21: note = Synthetic
  source 1..21: mol_type = other RNA
cagtcactgtgagctggtaag

SEQ ID NO: 7122 - RNA, 21 nt, synthetic construct
  misc_feature 1..21: note = Synthetic
  source 1..21: mol_type = other RNA
agtcactgtgagctggtaagt

SEQ ID NO: 7123 - RNA, 21 nt, synthetic construct
  misc_feature 1..21: note = Synthetic
  source 1..21: mol_type = other RNA
gtcactgtgagctggtaagtg

SEQ ID NO: 7124 - RNA, 21 nt, synthetic construct
  misc_feature 1..21: note = Synthetic
  source 1..21: mol_type = other RNA
tcactgtgagctggtaagtgt

SEQ ID NO: 7125 - RNA, 21 nt, synthetic construct
  misc_feature 1..21: note = Synthetic
  source 1..21: mol_type = other RNA
cactgtgagctggtaagtgta

SEQ ID NO: 7126 - RNA, 21 nt, synthetic construct
  misc_feature 1..21: note = Synthetic
  source 1..21: mol_type = other RNA
actgtgagctggtaagtgtag

SEQ ID NO: 7127 - RNA, 21 nt, synthetic construct
  misc_feature 1..21: note = Synthetic
  source 1..21: mol_type = other RNA
ctgtgagctggtaagtgtagt

SEQ ID NO: 7128 - RNA, 21 nt, synthetic construct
  misc_feature 1..21: note = Synthetic
  source 1..21: mol_type = other RNA
tgtgagctggtaagtgtagtc

SEQ ID NO: 7129 - RNA, 21 nt, synthetic construct
  misc_feature 1..21: note = Synthetic
  source 1..21: mol_type = other RNA
gtgagctggtaagtgtagtct

SEQ ID NO: 7130 - RNA, 21 nt, synthetic construct
  misc_feature 1..21: note = Synthetic
  source 1..21: mol_type = other RNA
tgagctggtaagtgtagtctc

SEQ ID NO: 7131 - RNA, 21 nt, synthetic construct
  misc_feature 1..21: note = Synthetic
  source 1..21: mol_type = other RNA
gagctggtaagtgtagtctcc

SEQ ID NO: 7132 - RNA, 21 nt, synthetic construct
  misc_feature 1..21: note = Synthetic
  source 1..21: mol_type = other RNA
agctggtaagtgtagtctcct

SEQ ID NO: 7133 - RNA, 21 nt, synthetic construct
  misc_feature 1..21: note = Synthetic
  source 1..21: mol_type = other RNA
gctggtaagtgtagtctcctt

SEQ ID NO: 7134 - RNA, 21 nt, synthetic construct
  misc_feature 1..21: note = Synthetic
  source 1..21: mol_type = other RNA
ctggtaagtgtagtctccttc

SEQ ID NO: 7135 - RNA, 21 nt, synthetic construct
  misc_feature 1..21: note = Synthetic
  source 1..21: mol_type = other RNA
tggtaagtgtagtctccttct

SEQ ID NO: 7136 - RNA, 21 nt, synthetic construct
  misc_feature 1..21: note = Synthetic
  source 1..21: mol_type = other RNA
ggtaagtgtagtctccttctt

SEQ ID NO: 7137 - RNA, 21 nt, synthetic construct
  misc_feature 1..21: note = Synthetic
  source 1..21: mol_type = other RNA
gtaagtgtagtctccttcttg

SEQ ID NO: 7138 - RNA, 21 nt, synthetic construct
  misc_feature 1..21: note = Synthetic
  source 1..21: mol_type = other RNA
taagtgtagtctccttcttgc

SEQ ID NO: 7139 - RNA, 21 nt, synthetic construct
  misc_feature 1..21: note = Synthetic
  source 1..21: mol_type = other RNA
aagtgtagtctccttcttgca

SEQ ID NO: 7140 - RNA, 21 nt, synthetic construct
  misc_feature 1..21: note = Synthetic
  source 1..21: mol_type = other RNA
agtgtagtctccttcttgcat

SEQ ID NO: 7141 - RNA, 21 nt, synthetic construct
  misc_feature 1..21: note = Synthetic
  source 1..21: mol_type = other RNA
gtgtagtctccttcttgcatc

SEQ ID NO: 7142 - RNA, 21 nt, synthetic construct
  misc_feature 1..21: note = Synthetic
  source 1..21: mol_type = other RNA
tgtagtctccttcttgcatcg

SEQ ID NO: 7143 - RNA, 21 nt, synthetic construct
  misc_feature 1..21: note = Synthetic
  source 1..21: mol_type = other RNA
gtagtctccttcttgcatcgc

SEQ ID NO: 7144 - RNA, 21 nt, synthetic construct
  misc_feature 1..21: note = Synthetic
  source 1..21: mol_type = other RNA
tagtctccttcttgcatcgca

SEQ ID NO: 7145 - RNA, 21 nt, synthetic construct
  misc_feature 1..21: note = Synthetic
  source 1..21: mol_type = other RNA
agtctccttcttgcatcgcag

SEQ ID NO: 7146 - RNA, 21 nt, synthetic construct
  misc_feature 1..21: note = Synthetic
  source 1..21: mol_type = other RNA
gtctccttcttgcatcgcaga

SEQ ID NO: 7147 - RNA, 21 nt, synthetic construct
  misc_feature 1..21: note = Synthetic
  source 1..21: mol_type = other RNA
tctccttcttgcatcgcagag

SEQ ID NO: 7148 - RNA, 21 nt, synthetic construct
  misc_feature 1..21: note = Synthetic
  source 1..21: mol_type = other RNA
ctccttcttgcatcgcagaga

SEQ ID NO: 7149 - RNA, 21 nt, synthetic construct
  misc_feature 1..21: note = Synthetic
  source 1..21: mol_type = other RNA
tccttcttgcatcgcagagag

SEQ ID NO: 7150 - RNA, 21 nt, synthetic construct
  misc_feature 1..21: note = Synthetic
  source 1..21: mol_type = other RNA
ccttcttgcatcgcagagagc

SEQ ID NO: 7151 - RNA, 21 nt, synthetic construct
  misc_feature 1..21: note = Synthetic
  source 1..21: mol_type = other RNA
cttcttgcatcgcagagagct

SEQ ID NO: 7152 - RNA, 21 nt, synthetic construct
  misc_feature 1..21: note = Synthetic
  source 1..21: mol_type = other RNA
ttcttgcatcgcagagagctg

SEQ ID NO: 7153 - RNA, 21 nt, synthetic construct
  misc_feature 1..21: note = Synthetic
  source 1..21: mol_type = other RNA
tcttgcatcgcagagagctgt

SEQ ID NO: 7154 - RNA, 21 nt, synthetic construct
  misc_feature 1..21: note = Synthetic
  source 1..21: mol_type = other RNA
cttgcatcgcagagagctgta

SEQ ID NO: 7155 - RNA, 21 nt, synthetic construct
  misc_feature 1..21: note = Synthetic
  source 1..21: mol_type = other RNA
ttgcatcgcagagagctgtaa

SEQ ID NO: 7156 - RNA, 21 nt, synthetic construct
  misc_feature 1..21: note = Synthetic
  source 1..21: mol_type = other RNA
tgcatcgcagagagctgtaag

SEQ ID NO: 7157 - RNA, 21 nt, synthetic construct
  misc_feature 1..21: note = Synthetic
  source 1..21: mol_type = other RNA
gcatcgcagagagctgtaagg

SEQ ID NO: 7158 - RNA, 21 nt, synthetic construct
  misc_feature 1..21: note = Synthetic
  source 1..21: mol_type = other RNA
catcgcagagagctgtaaggt

SEQ ID NO: 7159 - RNA, 21 nt, synthetic construct
  misc_feature 1..21: note = Synthetic
  source 1..21: mol_type = other RNA
atcgcagagagctgtaaggtt

SEQ ID NO: 7160 - RNA, 21 nt, synthetic construct
  misc_feature 1..21: note = Synthetic
  source 1..21: mol_type = other RNA
tcgcagagagctgtaaggttg

SEQ ID NO: 7161 - RNA, 21 nt, synthetic construct
  misc_feature 1..21: note = Synthetic
  source 1..21: mol_type = other RNA
cgcagagagctgtaaggttgg

SEQ ID NO: 7162 - RNA, 21 nt, synthetic construct
  misc_feature 1..21: note = Synthetic
  source 1..21: mol_type = other RNA
gcagagagctgtaaggttggt

SEQ ID NO: 7163 - RNA, 21 nt, synthetic construct
  misc_feature 1..21: note = Synthetic
  source 1..21: mol_type = other RNA
cagagagctgtaaggttggtg

SEQ ID NO: 7164 - RNA, 21 nt, synthetic construct
  misc_feature 1..21: note = Synthetic
  source 1..21: mol_type = other RNA
agagagctgtaaggttggtgt

SEQ ID NO: 7165 - RNA, 21 nt, synthetic construct
  misc_feature 1..21: note = Synthetic
  source 1..21: mol_type = other RNA
gagagctgtaaggttggtgtt

SEQ ID NO: 7166 - RNA, 21 nt, synthetic construct
  misc_feature 1..21: note = Synthetic
  source 1..21: mol_type = other RNA
agagctgtaaggttggtgttc

SEQ ID NO: 7167 - RNA, 21 nt, synthetic construct
  misc_feature 1..21: note = Synthetic
  source 1..21: mol_type = other RNA
gagctgtaaggttggtgttct

SEQ ID NO: 7168 - RNA, 21 nt, synthetic construct
  misc_feature 1..21: note = Synthetic
  source 1..21: mol_type = other RNA
agctgtaaggttggtgttcta

SEQ ID NO: 7169 - RNA, 21 nt, synthetic construct
  misc_feature 1..21: note = Synthetic
  source 1..21: mol_type = other RNA
gctgtaaggttggtgttctaa

SEQ ID NO: 7170 - RNA, 21 nt, synthetic construct
  misc_feature 1..21: note = Synthetic
  source 1..21: mol_type = other RNA
ctgtaaggttggtgttctaac

SEQ ID NO: 7171 - RNA, 21 nt, synthetic construct
  misc_feature 1..21: note = Synthetic
  source 1..21: mol_type = other RNA
tgtaaggttggtgttctaaca

SEQ ID NO: 7172 - RNA, 21 nt, synthetic construct
  misc_feature 1..21: note = Synthetic
  source 1..21: mol_type = other RNA
gtaaggttggtgttctaacac

SEQ ID NO: 7173 - RNA, 21 nt, synthetic construct
  misc_feature 1..21: note = Synthetic
  source 1..21: mol_type = other RNA
taaggttggtgttctaacacc

SEQ ID NO: 7174 - RNA, 21 nt, synthetic construct
  misc_feature 1..21: note = Synthetic
  source 1..21: mol_type = other RNA
aaggttggtgttctaacaccc

SEQ ID NO: 7175 - RNA, 21 nt, synthetic construct
  misc_feature 1..21: note = Synthetic
  source 1..21: mol_type = other RNA
aggttggtgttctaacaccct

SEQ ID NO: 7176 - RNA, 21 nt, synthetic construct
  misc_feature 1..21: note = Synthetic
  source 1..21: mol_type = other RNA
ggttggtgttctaacaccctg

SEQ ID NO: 7177 - RNA, 21 nt, synthetic construct
  misc_feature 1..21: note = Synthetic
  source 1..21: mol_type = other RNA
gttggtgttctaacaccctgc

SEQ ID NO: 7178 - RNA, 21 nt, synthetic construct
  misc_feature 1..21: note = Synthetic
  source 1..21: mol_type = other RNA
ttggtgttctaacaccctgca

SEQ ID NO: 7179 - RNA, 21 nt, synthetic construct
  misc_feature 1..21: note = Synthetic
  source 1..21: mol_type = other RNA
tggtgttctaacaccctgcat

SEQ ID NO: 7180 - RNA, 21 nt, synthetic construct
  misc_feature 1..21: note = Synthetic
  source 1..21: mol_type = other RNA
ggtgttctaacaccctgcatc

SEQ ID NO: 7181 - RNA, 21 nt, synthetic construct
  misc_feature 1..21: note = Synthetic
  source 1..21: mol_type = other RNA
gtgttctaacaccctgcatct

SEQ ID NO: 7182 - RNA, 21 nt, synthetic construct
  misc_feature 1..21: note = Synthetic
  source 1..21: mol_type = other RNA
tgttctaacaccctgcatctc

SEQ ID NO: 7183 - RNA, 21 nt, synthetic construct
  misc_feature 1..21: note = Synthetic
  source 1..21: mol_type = other RNA
gttctaacaccctgcatctcc

SEQ ID NO: 7184 - RNA, 21 nt, synthetic construct
  misc_feature 1..21: note = Synthetic
  source 1..21: mol_type = other RNA
ttctaacaccctgcatctcca

SEQ ID NO: 7185 - RNA, 21 nt, synthetic construct
  misc_feature 1..21: note = Synthetic
  source 1..21: mol_type = other RNA
tctaacaccctgcatctccac

SEQ ID NO: 7186 - RNA, 21 nt, synthetic construct
  misc_feature 1..21: note = Synthetic
  source 1..21: mol_type = other RNA
ctaacaccctgcatctccacc

SEQ ID NO: 7187 - RNA, 21 nt, synthetic construct
  misc_feature 1..21: note = Synthetic
  source 1..21: mol_type = other RNA
taacaccctgcatctccacca

SEQ ID NO: 7188 - RNA, 21 nt, synthetic construct
  misc_feature 1..21: note = Synthetic
  source 1..21: mol_type = other RNA
aacaccctgcatctccaccac

SEQ ID NO: 7189 - RNA, 21 nt, synthetic construct
  misc_feature 1..21: note = Synthetic
  source 1..21: mol_type = other RNA
acaccctgcatctccaccact

SEQ ID NO: 7190 - RNA, 21 nt, synthetic construct
  misc_feature 1..21: note = Synthetic
  source 1..21: mol_type = other RNA
caccctgcatctccaccactt

SEQ ID NO: 7191 - RNA, 21 nt, synthetic construct
  misc_feature 1..21: note = Synthetic
  source 1..21: mol_type = other RNA
accctgcatctccaccacttt

SEQ ID NO: 7192 - RNA, 21 nt, synthetic construct
  misc_feature 1..21: note = Synthetic
  source 1..21: mol_type = other RNA
ccctgcatctccaccactttc

SEQ ID NO: 7193 - RNA, 21 nt, synthetic construct
  misc_feature 1..21: note = Synthetic
  source 1..21: mol_type = other RNA
cctgcatctccaccactttcc

SEQ ID NO: 7194 - RNA, 21 nt, synthetic construct
  misc_feature 1..21: note = Synthetic
  source 1..21: mol_type = other RNA
ctgcatctccaccactttccc

SEQ ID NO: 7195 - RNA, 21 nt, synthetic construct
  misc_feature 1..21: note = Synthetic
  source 1..21: mol_type = other RNA
tgcatctccaccactttccct

SEQ ID NO: 7196 - RNA, 21 nt, synthetic construct
  misc_feature 1..21: note = Synthetic
  source 1..21: mol_type = other RNA
gcatctccaccactttccctt

SEQ ID NO: 7197 - RNA, 21 nt, synthetic construct
  misc_feature 1..21: note = Synthetic
  source 1..21: mol_type = other RNA
catctccaccactttcccttt

SEQ ID NO: 7198 - RNA, 21 nt, synthetic construct
  misc_feature 1..21: note = Synthetic
  source 1..21: mol_type = other RNA
atctccaccactttccctttg

SEQ ID NO: 7199 - RNA, 21 nt, synthetic construct
  misc_feature 1..21: note = Synthetic
  source 1..21: mol_type = other RNA
tctccaccactttccctttgc

SEQ ID NO: 7200 - RNA, 21 nt, synthetic construct
  misc_feature 1..21: note = Synthetic
  source 1..21: mol_type = other RNA
ctccaccactttccctttgct

SEQ ID NO: 7201 - RNA, 21 nt, synthetic construct
  misc_feature 1..21: note = Synthetic
  source 1..21: mol_type = other RNA
tccaccactttccctttgctg

SEQ ID NO: 7202 - RNA, 21 nt, synthetic construct
  misc_feature 1..21: note = Synthetic
  source 1..21: mol_type = other RNA
ccaccactttccctttgctgc

SEQ ID NO: 7203 - RNA, 21 nt, synthetic construct
  misc_feature 1..21: note = Synthetic
  source 1..21: mol_type = other RNA
caccactttccctttgctgct

SEQ ID NO: 7204 - RNA, 21 nt, synthetic construct
  misc_feature 1..21: note = Synthetic
  source 1..21: mol_type = other RNA
accactttccctttgctgctt

SEQ ID NO: 7205 - RNA, 21 nt, synthetic construct
  misc_feature 1..21: note = Synthetic
  source 1..21: mol_type = other RNA
ccactttccctttgctgcttg

SEQ ID NO: 7206 - RNA, 21 nt, synthetic construct
  misc_feature 1..21: note = Synthetic
  source 1..21: mol_type = other RNA
cactttccctttgctgcttgg

SEQ ID NO: 7207 - RNA, 21 nt, synthetic construct
  misc_feature 1..21: note = Synthetic
  source 1..21: mol_type = other RNA
actttccctttgctgcttggg

SEQ ID NO: 7208 - RNA, 21 nt, synthetic construct
  misc_feature 1..21: note = Synthetic
  source 1..21: mol_type = other RNA
ctttccctttgctgcttgggc

SEQ ID NO: 7209 - RNA, 21 nt, synthetic construct
  misc_feature 1..21: note = Synthetic
  source 1..21: mol_type = other RNA
tttccctttgctgcttgggct

SEQ ID NO: 7210 - RNA, 21 nt, synthetic construct
  misc_feature 1..21: note = Synthetic
  source 1..21: mol_type = other RNA
ttccctttgctgcttgggctg

SEQ ID NO: 7211 - RNA, 21 nt, synthetic construct
  misc_feature 1..21: note = Synthetic
  source 1..21: mol_type = other RNA
tccctttgctgcttgggctga

SEQ ID NO: 7212 - RNA, 21 nt, synthetic construct
  misc_feature 1..21: note = Synthetic
  source 1..21: mol_type = other RNA
ccctttgctgcttgggctgag

SEQ ID NO: 7213 - RNA, 21 nt, synthetic construct
  misc_feature 1..21: note = Synthetic
  source 1..21: mol_type = other RNA
cctttgctgcttgggctgagt

SEQ ID NO: 7214 - RNA, 21 nt, synthetic construct
  misc_feature 1..21: note = Synthetic
  source 1..21: mol_type = other RNA
ctttgctgcttgggctgagtg

SEQ ID NO: 7215 - RNA, 21 nt, synthetic construct
  misc_feature 1..21: note = Synthetic
  source 1..21: mol_type = other RNA
tttgctgcttgggctgagtga

SEQ ID NO: 7216 - RNA, 21 nt, synthetic construct
  misc_feature 1..21: note = Synthetic
  source 1..21: mol_type = other RNA
ttgctgcttgggctgagtgac

SEQ ID NO: 7217 - RNA, 21 nt, synthetic construct
  misc_feature 1..21: note = Synthetic
  source 1..21: mol_type = other RNA
tgctgcttgggctgagtgacc

SEQ ID NO: 7218 - RNA, 21 nt, synthetic construct
  misc_feature 1..21: note = Synthetic
  source 1..21: mol_type = other RNA
gctgcttgggctgagtgacca

SEQ ID NO: 7219 - RNA, 21 nt, synthetic construct
  misc_feature 1..21: note = Synthetic
  source 1..21: mol_type = other RNA
ctgcttgggctgagtgaccac

SEQ ID NO: 7220 - RNA, 21 nt, synthetic construct
  misc_feature 1..21: note = Synthetic
  source 1..21: mol_type = other RNA
tgcttgggctgagtgaccact

SEQ ID NO: 7221 - RNA, 21 nt, synthetic construct
  misc_feature 1..21: note = Synthetic
  source 1..21: mol_type = other RNA
gcttgggctgagtgaccactc

SEQ ID NO: 7222 - RNA, 21 nt, synthetic construct
  misc_feature 1..21: note = Synthetic
  source 1..21: mol_type = other RNA
cttgggctgagtgaccactca

SEQ ID NO: 7223 - RNA, 21 nt, synthetic construct
  misc_feature 1..21: note = Synthetic
  source 1..21: mol_type = other RNA
ttgggctgagtgaccactcat

SEQ ID NO: 7224 - RNA, 21 nt, synthetic construct
  misc_feature 1..21: note = Synthetic
  source 1..21: mol_type = other RNA
tgggctgagtgaccactcata

SEQ ID NO: 7225 - RNA, 21 nt, synthetic construct
  misc_feature 1..21: note = Synthetic
  source 1..21: mol_type = other RNA
gggctgagtgaccactcatag

SEQ ID NO: 7226 - RNA, 21 nt, synthetic construct
  misc_feature 1..21: note = Synthetic
  source 1..21: mol_type = other RNA
ggctgagtgaccactcatagc

SEQ ID NO: 7227 - RNA, 21 nt, synthetic construct
  misc_feature 1..21: note = Synthetic
  source 1..21: mol_type = other RNA
gctgagtgaccactcatagct

SEQ ID NO: 7228 - RNA, 21 nt, synthetic construct
  misc_feature 1..21: note = Synthetic
  source 1..21: mol_type = other RNA
ctgagtgaccactcatagctg

SEQ ID NO: 7229 - RNA, 21 nt, synthetic construct
  misc_feature 1..21: note = Synthetic
  source 1..21: mol_type = other RNA
tgagtgaccactcatagctgg

SEQ ID NO: 7230 - RNA, 21 nt, synthetic construct
  misc_feature 1..21: note = Synthetic
  source 1..21: mol_type = other RNA
gagtgaccactcatagctggt

SEQ ID NO: 7231 - RNA, 21 nt, synthetic construct
  misc_feature 1..21: note = Synthetic
  source 1..21: mol_type = other RNA
agtgaccactcatagctggtg

SEQ ID NO: 7232 - RNA, 21 nt, synthetic construct
  misc_feature 1..21: note = Synthetic
  source 1..21: mol_type = other RNA
gtgaccactcatagctggtga

SEQ ID NO: 7233 - RNA, 21 nt, synthetic construct
  misc_feature 1..21: note = Synthetic
  source 1..21: mol_type = other RNA
tgaccactcatagctggtgat

SEQ ID NO: 7234 - RNA, 21 nt, synthetic construct
  misc_feature 1..21: note = Synthetic
  source 1..21: mol_type = other RNA
gaccactcatagctggtgatg

SEQ ID NO: 7235 - RNA, 21 nt, synthetic construct
  misc_feature 1..21: note = Synthetic
  source 1..21: mol_type = other RNA
accactcatagctggtgatgc

SEQ ID NO: 7236 - RNA, 21 nt, synthetic construct
  misc_feature 1..21: note = Synthetic
  source 1..21: mol_type = other RNA
ccactcatagctggtgatgcc

SEQ ID NO: 7237 - RNA, 21 nt, synthetic construct
  misc_feature 1..21: note = Synthetic
  source 1..21: mol_type = other RNA
cactcatagctggtgatgcca

SEQ ID NO: 7238 - RNA, 21 nt, synthetic construct
  misc_feature 1..21: note = Synthetic
  source 1..21: mol_type = other RNA
actcatagctggtgatgccat

SEQ ID NO: 7239 - RNA, 21 nt, synthetic construct
  misc_feature 1..21: note = Synthetic
  source 1..21: mol_type = other RNA
ctcatagctggtgatgccatg

SEQ ID NO: 7240 - RNA, 21 nt, synthetic construct
  misc_feature 1..21: note = Synthetic
  source 1..21: mol_type = other RNA
tcatagctggtgatgccatga

SEQ ID NO: 7241 - RNA, 21 nt, synthetic construct
  misc_feature 1..21: note = Synthetic
  source 1..21: mol_type = other RNA
catagctggtgatgccatgat

SEQ ID NO: 7242 - RNA, 21 nt, synthetic construct
  misc_feature 1..21: note = Synthetic
  source 1..21: mol_type = other RNA
atagctggtgatgccatgatc

SEQ ID NO: 7243 - RNA, 21 nt, synthetic construct
  misc_feature 1..21: note = Synthetic
  source 1..21: mol_type = other RNA
tagctggtgatgccatgatca

SEQ ID NO: 7244 - RNA, 21 nt, synthetic construct
  misc_feature 1..21: note = Synthetic
  source 1..21: mol_type = other RNA
agctggtgatgccatgatcat

SEQ ID NO: 7245 - RNA, 21 nt, synthetic construct
  misc_feature 1..21: note = Synthetic
  source 1..21: mol_type = other RNA
gctggtgatgccatgatcatc

SEQ ID NO: 7246 - RNA, 21 nt, synthetic construct
  misc_feature 1..21: note = Synthetic
  source 1..21: mol_type = other RNA
ctggtgatgccatgatcatca

SEQ ID NO: 7247 - RNA, 21 nt, synthetic construct
  misc_feature 1..21: note = Synthetic
  source 1..21: mol_type = other RNA
tggtgatgccatgatcatcag

SEQ ID NO: 7248 - RNA, 21 nt, synthetic construct
  misc_feature 1..21: note = Synthetic
  source 1..21: mol_type = other RNA
ggtgatgccatgatcatcagt

SEQ ID NO: 7249 - RNA, 21 nt, synthetic construct
  misc_feature 1..21: note = Synthetic
  source 1..21: mol_type = other RNA
gtgatgccatgatcatcagtg

SEQ ID NO: 7250 - RNA, 21 nt, synthetic construct
  misc_feature 1..21: note = Synthetic
  source 1..21: mol_type = other RNA
tgatgccatgatcatcagtgc

SEQ ID NO: 7251 - RNA, 21 nt, synthetic construct
  misc_feature 1..21: note = Synthetic
  source 1..21: mol_type = other RNA
gatgccatgatcatcagtgct

SEQ ID NO: 7252 - RNA, 21 nt, synthetic construct
  misc_feature 1..21: note = Synthetic
  source 1..21: mol_type = other RNA
atgccatgatcatcagtgctc

SEQ ID NO: 7253 - RNA, 21 nt, synthetic construct
  misc_feature 1..21: note = Synthetic
  source 1..21: mol_type = other RNA
tgccatgatcatcagtgctct

SEQ ID NO: 7254 - RNA, 21 nt, synthetic construct
  misc_feature 1..21: note = Synthetic
  source 1..21: mol_type = other RNA
gccatgatcatcagtgctctg

SEQ ID NO: 7255 - RNA, 21 nt, synthetic construct
  misc_feature 1..21: note = Synthetic
  source 1..21: mol_type = other RNA
ccatgatcatcagtgctctgg

SEQ ID NO: 7256 - RNA, 21 nt, synthetic construct
  misc_feature 1..21: note = Synthetic
  source 1..21: mol_type = other RNA
catgatcatcagtgctctggt

SEQ ID NO: 7257 - RNA, 21 nt, synthetic construct
  misc_feature 1..21: note = Synthetic
  source 1..21: mol_type = other RNA
atgatcatcagtgctctggtt

SEQ ID NO: 7258 - RNA, 21 nt, synthetic construct
  misc_feature 1..21: note = Synthetic
  source 1..21: mol_type = other RNA
tgatcatcagtgctctggttc

SEQ ID NO: 7259 - RNA, 21 nt, synthetic construct
  misc_feature 1..21: note = Synthetic
  source 1..21: mol_type = other RNA
gatcatcagtgctctggttcc

SEQ ID NO: 7260 - RNA, 21 nt, synthetic construct
  misc_feature 1..21: note = Synthetic
  source 1..21: mol_type = other RNA
atcatcagtgctctggttccc

SEQ ID NO: 7261 - RNA, 21 nt, synthetic construct
  misc_feature 1..21: note = Synthetic
  source 1..21: mol_type = other RNA
tcatcagtgctctggttccca

SEQ ID NO: 7262 - RNA, 21 nt, synthetic construct
  misc_feature 1..21: note = Synthetic
  source 1..21: mol_type = other RNA
catcagtgctctggttcccaa

SEQ ID NO: 7263 - RNA, 21 nt, synthetic construct
  misc_feature 1..21: note = Synthetic
  source 1..21: mol_type = other RNA
atcagtgctctggttcccaaa

SEQ ID NO: 7264 - RNA, 21 nt, synthetic construct
  misc_feature 1..21: note = Synthetic
  source 1..21: mol_type = other RNA
tcagtgctctggttcccaaag

SEQ ID NO: 7265 - RNA, 21 nt, synthetic construct
  misc_feature 1..21: note = Synthetic
  source 1..21: mol_type = other RNA
cagtgctctggttcccaaaga

SEQ ID NO: 7266 - RNA, 21 nt, synthetic construct
  misc_feature 1..21: note = Synthetic
  source 1..21: mol_type = other RNA
agtgctctggttcccaaagag

SEQ ID NO: 7267 - RNA, 21 nt, synthetic construct
  misc_feature 1..21: note = Synthetic
  source 1..21: mol_type = other RNA
gtgctctggttcccaaagagg

SEQ ID NO: 7268 - RNA, 21 nt, synthetic construct
  misc_feature 1..21: note = Synthetic
  source 1..21: mol_type = other RNA
tgctctggttcccaaagaggg

SEQ ID NO: 7269 - RNA, 21 nt, synthetic construct
  misc_feature 1..21: note = Synthetic
  source 1..21: mol_type = other RNA
gctctggttcccaaagagggt

SEQ ID NO: 7270 - RNA, 21 nt, synthetic construct
  misc_feature 1..21: note = Synthetic
  source 1..21: mol_type = other RNA
ctctggttcccaaagagggtg

SEQ ID NO: 7271 - RNA, 21 nt, synthetic construct
  misc_feature 1..21: note = Synthetic
  source 1..21: mol_type = other RNA
tctggttcccaaagagggtga

SEQ ID NO: 7272 - RNA, 21 nt, synthetic construct
  misc_feature 1..21: note = Synthetic
  source 1..21: mol_type = other RNA
ctggttcccaaagagggtgat

SEQ ID NO: 7273 - RNA, 21 nt, synthetic construct
  misc_feature 1..21: note = Synthetic
  source 1..21: mol_type = other RNA
tggttcccaaagagggtgatg

SEQ ID NO: 7274 - RNA, 21 nt, synthetic construct
  misc_feature 1..21: note = Synthetic
  source 1..21: mol_type = other RNA
ggttcccaaagagggtgatgg

SEQ ID NO: 7275 - RNA, 21 nt, synthetic construct
  misc_feature 1..21: note = Synthetic
  source 1..21: mol_type = other RNA
gttcccaaagagggtgatgga

SEQ ID NO: 7276 - RNA, 21 nt, synthetic construct
  misc_feature 1..21: note = Synthetic
  source 1..21: mol_type = other RNA
ttcccaaagagggtgatggag

SEQ ID NO: 7277 - RNA, 21 nt, synthetic construct
  misc_feature 1..21: note = Synthetic
  source 1..21: mol_type = other RNA
tcccaaagagggtgatggagt

SEQ ID NO: 7278 - RNA, 21 nt, synthetic construct
  misc_feature 1..21: note = Synthetic
  source 1..21: mol_type = other RNA
cccaaagagggtgatggagtt

SEQ ID NO: 7279 - RNA, 21 nt, synthetic construct
  misc_feature 1..21: note = Synthetic
  source 1..21: mol_type = other RNA
ccaaagagggtgatggagttt

SEQ ID NO: 7280 - RNA, 21 nt, synthetic construct
  misc_feature 1..21: note = Synthetic
  source 1..21: mol_type = other RNA
caaagagggtgatggagtttt

SEQ ID NO: 7281 - RNA, 21 nt, synthetic construct
  misc_feature 1..21: note = Synthetic
  source 1..21: mol_type = other RNA
aaagagggtgatggagttttg

SEQ ID NO: 7282 - RNA, 21 nt, synthetic construct
  misc_feature 1..21: note = Synthetic
  source 1..21: mol_type = other RNA
aagagggtgatggagttttgg

SEQ ID NO: 7283 - RNA, 21 nt, synthetic construct
  misc_feature 1..21: note = Synthetic
  source 1..21: mol_type = other RNA
agagggtgatggagttttggg

SEQ ID NO: 7284 - RNA, 21 nt, synthetic construct
  misc_feature 1..21: note = Synthetic
  source 1..21: mol_type = other RNA
gagggtgatggagttttgggg

SEQ ID NO: 7285 - RNA, 21 nt, synthetic construct
  misc_feature 1..21: note = Synthetic
  source 1..21: mol_type = other RNA
agggtgatggagttttggggc

SEQ ID NO: 7286 - RNA, 21 nt, synthetic construct
  misc_feature 1..21: note = Synthetic
  source 1..21: mol_type = other RNA
gggtgatggagttttggggca

SEQ ID NO: 7287 - RNA, 21 nt, synthetic construct
  misc_feature 1..21: note = Synthetic
  source 1..21: mol_type = other RNA
ggtgatggagttttggggcag

SEQ ID NO: 7288 - RNA, 21 nt, synthetic construct
  misc_feature 1..21: note = Synthetic
  source 1..21: mol_type = other RNA
gtgatggagttttggggcagg

SEQ ID NO: 7289 - RNA, 21 nt, synthetic construct
  misc_feature 1..21: note = Synthetic
  source 1..21: mol_type = other RNA
tgatggagttttggggcaggg

SEQ ID NO: 7290 - RNA, 21 nt, synthetic construct
  misc_feature 1..21: note = Synthetic
  source 1..21: mol_type = other RNA
gatggagttttggggcagggt

SEQ ID NO: 7291 - RNA, 21 nt, synthetic construct
  misc_feature 1..21: note = Synthetic
  source 1..21: mol_type = other RNA
atggagttttggggcagggtg

SEQ ID NO: 7292 - RNA, 21 nt, synthetic construct
  misc_feature 1..21: note = Synthetic
  source 1..21: mol_type = other RNA
tggagttttggggcagggtga

SEQ ID NO: 7293 - RNA, 21 nt, synthetic construct
  misc_feature 1..21: note = Synthetic
  source 1..21: mol_type = other RNA
ggagttttggggcagggtgat

SEQ ID NO: 7294 - RNA, 21 nt, synthetic construct
  misc_feature 1..21: note = Synthetic
  source 1..21: mol_type = other RNA
gagttttggggcagggtgatc

SEQ ID NO: 7295 - RNA, 21 nt, synthetic construct
  misc_feature 1..21: note = Synthetic
  source 1..21: mol_type = other RNA
agttttggggcagggtgatca

SEQ ID NO: 7296 - RNA, 21 nt, synthetic construct
  misc_feature 1..21: note = Synthetic
  source 1..21: mol_type = other RNA
gttttggggcagggtgatcac

SEQ ID NO: 7297 - RNA, 21 nt, synthetic construct
  misc_feature 1..21: note = Synthetic
  source 1..21: mol_type = other RNA
ttttggggcagggtgatcact

SEQ ID NO: 7298 - RNA, 21 nt, synthetic construct
  misc_feature 1..21: note = Synthetic
  source 1..21: mol_type = other RNA
tttggggcagggtgatcactt

SEQ ID NO: 7299 - RNA, 21 nt, synthetic construct
  misc_feature 1..21: note = Synthetic
  source 1..21: mol_type = other RNA
ttggggcagggtgatcacttg

SEQ ID NO: 7300 - RNA, 21 nt, synthetic construct
  misc_feature 1..21: note = Synthetic
  source 1..21: mol_type = other RNA
tggggcagggtgatcacttgg

SEQ ID NO: 7301 - RNA, 21 nt, synthetic construct
  misc_feature 1..21: note = Synthetic
  source 1..21: mol_type = other RNA
ggggcagggtgatcacttggt

SEQ ID NO: 7302 - RNA, 21 nt, synthetic construct
  misc_feature 1..21: note = Synthetic
  source 1..21: mol_type = other RNA
gggcagggtgatcacttggtt

SEQ ID NO: 7303 - RNA, 21 nt, synthetic construct
  misc_feature 1..21: note = Synthetic
  source 1..21: mol_type = other RNA
ggcagggtgatcacttggttg

SEQ ID NO: 7304 - RNA, 21 nt, synthetic construct
  misc_feature 1..21: note = Synthetic
  source 1..21: mol_type = other RNA
gcagggtgatcacttggttgg

SEQ ID NO: 7305 - RNA, 21 nt, synthetic construct
  misc_feature 1..21: note = Synthetic
  source 1..21: mol_type = other RNA
cagggtgatcacttggttggg

SEQ ID NO: 7306 - RNA, 21 nt, synthetic construct
  misc_feature 1..21: note = Synthetic
  source 1..21: mol_type = other RNA
agggtgatcacttggttgggg

SEQ ID NO: 7307 - RNA, 21 nt, synthetic construct
  misc_feature 1..21: note = Synthetic
  source 1..21: mol_type = other RNA
gggtgatcacttggttggggc

SEQ ID NO: 7308 - RNA, 21 nt, synthetic construct
  misc_feature 1..21: note = Synthetic
  source 1..21: mol_type = other RNA
ggtgatcacttggttggggcc

SEQ ID NO: 7309 - RNA, 21 nt, synthetic construct
  misc_feature 1..21: note = Synthetic
  source 1..21: mol_type = other RNA
gtgatcacttggttggggcct

SEQ ID NO: 7310 - RNA, 21 nt, synthetic construct
  misc_feature 1..21: note = Synthetic
  source 1..21: mol_type = other RNA
tgatcacttggttggggcctg

SEQ ID NO: 7311 - RNA, 21 nt, synthetic construct
  misc_feature 1..21: note = Synthetic
  source 1..21: mol_type = other RNA
gatcacttggttggggcctgc

SEQ ID NO: 7312 - RNA, 21 nt, synthetic construct
  misc_feature 1..21: note = Synthetic
  source 1..21: mol_type = other RNA
atcacttggttggggcctgcg

SEQ ID NO: 7313 - RNA, 21 nt, synthetic construct
  misc_feature 1..21: note = Synthetic
  source 1..21: mol_type = other RNA
tcacttggttggggcctgcgt

SEQ ID NO: 7314 - RNA, 21 nt, synthetic construct
  misc_feature 1..21: note = Synthetic
  source 1..21: mol_type = other RNA
cacttggttggggcctgcgtt

SEQ ID NO: 7315 - RNA, 21 nt, synthetic construct
  misc_feature 1..21: note = Synthetic
  source 1..21: mol_type = other RNA
acttggttggggcctgcgttg

SEQ ID NO: 7316 - RNA, 21 nt, synthetic construct
  misc_feature 1..21: note = Synthetic
  source 1..21: mol_type = other RNA
cttggttggggcctgcgttgg

SEQ ID NO: 7317 - RNA, 21 nt, synthetic construct
  misc_feature 1..21: note = Synthetic
  source 1..21: mol_type = other RNA
ttggttggggcctgcgttggc

SEQ ID NO: 7318 - RNA, 21 nt, synthetic construct
  misc_feature 1..21: note = Synthetic
  source 1..21: mol_type = other RNA
tggttggggcctgcgttggcc

SEQ ID NO: 7319 - RNA, 21 nt, synthetic construct
  misc_feature 1..21: note = Synthetic
  source 1..21: mol_type = other RNA
ggttggggcctgcgttggcca

SEQ ID NO: 7320 - RNA, 21 nt, synthetic construct
  misc_feature 1..21: note = Synthetic
  source 1..21: mol_type = other RNA
gttggggcctgcgttggccac

SEQ ID NO: 7321 - RNA, 21 nt, synthetic construct
  misc_feature 1..21: note = Synthetic
  source 1..21: mol_type = other RNA
ttggggcctgcgttggccaca

SEQ ID NO: 7322 - RNA, 21 nt, synthetic construct
  misc_feature 1..21: note = Synthetic
  source 1..21: mol_type = other RNA
tggggcctgcgttggccacag

SEQ ID NO: 7323 - RNA, 21 nt, synthetic construct
  misc_feature 1..21: note = Synthetic
  source 1..21: mol_type = other RNA
ggggcctgcgttggccacagg

SEQ ID NO: 7324 - RNA, 21 nt, synthetic construct
  misc_feature 1..21: note = Synthetic
  source 1..21: mol_type = other RNA
gggcctgcgttggccacaggg

SEQ ID NO: 7325 - RNA, 21 nt, synthetic construct
  misc_feature 1..21: note = Synthetic
  source 1..21: mol_type = other RNA
ggcctgcgttggccacagggg

SEQ ID NO: 7326 - RNA, 21 nt, synthetic construct
  misc_feature 1..21: note = Synthetic
  source 1..21: mol_type = other RNA
gcctgcgttggccacaggggg

SEQ ID NO: 7327 - RNA, 21 nt, synthetic construct
  misc_feature 1..21: note = Synthetic
  source 1..21: mol_type = other RNA
cctgcgttggccacagggggg

SEQ ID NO: 7328 - RNA, 21 nt, synthetic construct
  misc_feature 1..21: note = Synthetic
  source 1..21: mol_type = other RNA
ctgcgttggccacaggggggt

SEQ ID NO: 7329 - RNA, 21 nt, synthetic construct
  misc_feature 1..21: note = Synthetic
  source 1..21: mol_type = other RNA
tgcgttggccacaggggggta

SEQ ID NO: 7330 - RNA, 21 nt, synthetic construct
  misc_feature 1..21: note = Synthetic
  source 1..21: mol_type = other RNA
gcgttggccacaggggggtaa

SEQ ID NO: 7331 - RNA, 21 nt, synthetic construct
  misc_feature 1..21: note = Synthetic
  source 1..21: mol_type = other RNA
cgttggccacaggggggtaat

SEQ ID NO: 7332 - RNA, 21 nt, synthetic construct
  misc_feature 1..21: note = Synthetic
  source 1..21: mol_type = other RNA
gttggccacaggggggtaatc

SEQ ID NO: 7333 - RNA, 21 nt, synthetic construct
  misc_feature 1..21: note = Synthetic
  source 1..21: mol_type = other RNA
ttggccacaggggggtaatcc

SEQ ID NO: 7334 - RNA, 21 nt, synthetic construct
  misc_feature 1..21: note = Synthetic
  source 1..21: mol_type = other RNA
tggccacaggggggtaatcca

SEQ ID NO: 7335 - RNA, 21 nt, synthetic construct
  misc_feature 1..21: note = Synthetic
  source 1..21: mol_type = other RNA
ggccacaggggggtaatccac

SEQ ID NO: 7336 - RNA, 21 nt, synthetic construct
  misc_feature 1..21: note = Synthetic
  source 1..21: mol_type = other RNA
gccacaggggggtaatccaca

SEQ ID NO: 7337 - RNA, 21 nt, synthetic construct
  misc_feature 1..21: note = Synthetic
  source 1..21: mol_type = other RNA
ccacaggggggtaatccacag

SEQ ID NO: 7338 - RNA, 21 nt, synthetic construct
  misc_feature 1..21: note = Synthetic
  source 1..21: mol_type = other RNA
cacaggggggtaatccacagc

SEQ ID NO: 7339 - RNA, 21 nt, synthetic construct
  misc_feature 1..21: note = Synthetic
  source 1..21: mol_type = other RNA
acaggggggtaatccacagct

SEQ ID NO: 7340 - RNA, 21 nt, synthetic construct
  misc_feature 1..21: note = Synthetic
  source 1..21: mol_type = other RNA
caggggggtaatccacagctt

SEQ ID NO: 7341 - RNA, 21 nt, synthetic construct
  misc_feature 1..21: note = Synthetic
  source 1..21: mol_type = other RNA
aggggggtaatccacagcttt

SEQ ID NO: 7342 - RNA, 21 nt, synthetic construct
  misc_feature 1..21: note = Synthetic
  source 1..21: mol_type = other RNA
ggggggtaatccacagctttg

SEQ ID NO: 7343 - RNA, 21 nt, synthetic construct
  misc_feature 1..21: note = Synthetic
  source 1..21: mol_type = other RNA
gggggtaatccacagctttgt

SEQ ID NO: 7344 - RNA, 21 nt, synthetic construct
  misc_feature 1..21: note = Synthetic
  source 1..21: mol_type = other RNA
ggggtaatccacagctttgtt

SEQ ID NO: 7345 - RNA, 21 nt, synthetic construct
  misc_feature 1..21: note = Synthetic
  source 1..21: mol_type = other RNA
gggtaatccacagctttgttc

SEQ ID NO: 7346 - RNA, 21 nt, synthetic construct
  misc_feature 1..21: note = Synthetic
  source 1..21: mol_type = other RNA
ggtaatccacagctttgttca

SEQ ID NO: 7347 - RNA, 21 nt, synthetic construct
  misc_feature 1..21: note = Synthetic
  source 1..21: mol_type = other RNA
gtaatccacagctttgttcac

SEQ ID NO: 7348 - RNA, 21 nt, synthetic construct
  misc_feature 1..21: note = Synthetic
  source 1..21: mol_type = other RNA
taatccacagctttgttcact

SEQ ID NO: 7349 - RNA, 21 nt, synthetic construct
  misc_feature 1..21: note = Synthetic
  source 1..21: mol_type = other RNA
aatccacagctttgttcactg

SEQ ID NO: 7350 - RNA, 21 nt, synthetic construct
  misc_feature 1..21: note = Synthetic
  source 1..21: mol_type = other RNA
atccacagctttgttcactgt

SEQ ID NO: 7351 - RNA, 21 nt, synthetic construct
  misc_feature 1..21: note = Synthetic
  source 1..21: mol_type = other RNA
tccacagctttgttcactgtc

SEQ ID NO: 7352 - RNA, 21 nt, synthetic construct
  misc_feature 1..21: note = Synthetic
  source 1..21: mol_type = other RNA
ccacagctttgttcactgtca

SEQ ID NO: 7353 - RNA, 21 nt, synthetic construct
  misc_feature 1..21: note = Synthetic
  source 1..21: mol_type = other RNA
cacagctttgttcactgtcag

SEQ ID NO: 7354 - RNA, 21 nt, synthetic construct
  misc_feature 1..21: note = Synthetic
  source 1..21: mol_type = other RNA
acagctttgttcactgtcagg

SEQ ID NO: 7355 - RNA, 21 nt, synthetic construct
  misc_feature 1..21: note = Synthetic
  source 1..21: mol_type = other RNA
cagctttgttcactgtcaggt

SEQ ID NO: 7356 - RNA, 21 nt, synthetic construct
  misc_feature 1..21: note = Synthetic
  source 1..21: mol_type = other RNA
agctttgttcactgtcaggtt

SEQ ID NO: 7357 - RNA, 21 nt, synthetic construct
  misc_feature 1..21: note = Synthetic
  source 1..21: mol_type = other RNA
gctttgttcactgtcaggttt

SEQ ID NO: 7358 - RNA, 21 nt, synthetic construct
  misc_feature 1..21: note = Synthetic
  source 1..21: mol_type = other RNA
ctttgttcactgtcaggtttg

SEQ ID NO: 7359 - RNA, 21 nt, synthetic construct
  misc_feature 1..21: note = Synthetic
  source 1..21: mol_type = other RNA
tttgttcactgtcaggtttgc

SEQ ID NO: 7360 - RNA, 21 nt, synthetic construct
  misc_feature 1..21: note = Synthetic
  source 1..21: mol_type = other RNA
ttgttcactgtcaggtttgca

SEQ ID NO: 7361 - RNA, 21 nt, synthetic construct
  misc_feature 1..21: note = Synthetic
  source 1..21: mol_type = other RNA
tgttcactgtcaggtttgcag

SEQ ID NO: 7362 - RNA, 21 nt, synthetic construct
  misc_feature 1..21: note = Synthetic
  source 1..21: mol_type = other RNA
gttcactgtcaggtttgcagt

SEQ ID NO: 7363 - RNA, 21 nt, synthetic construct
  misc_feature 1..21: note = Synthetic
  source 1..21: mol_type = other RNA
ttcactgtcaggtttgcagta

SEQ ID NO: 7364 - RNA, 21 nt, synthetic construct
  misc_feature 1..21: note = Synthetic
  source 1..21: mol_type = other RNA
tcactgtcaggtttgcagtag

SEQ ID NO: 7365 - RNA, 21 nt, synthetic construct
  misc_feature 1..21: note = Synthetic
  source 1..21: mol_type = other RNA
cactgtcaggtttgcagtagt

SEQ ID NO: 7366 - RNA, 21 nt, synthetic construct
  misc_feature 1..21: note = Synthetic
  source 1..21: mol_type = other RNA
actgtcaggtttgcagtagta

SEQ ID NO: 7367 - RNA, 21 nt, synthetic construct
  misc_feature 1..21: note = Synthetic
  source 1..21: mol_type = other RNA
ctgtcaggtttgcagtagtag

SEQ ID NO: 7368 - RNA, 21 nt, synthetic construct
  misc_feature 1..21: note = Synthetic
  source 1..21: mol_type = other RNA
tgtcaggtttgcagtagtaga

SEQ ID NO: 7369 - RNA, 21 nt, synthetic construct
  misc_feature 1..21: note = Synthetic
  source 1..21: mol_type = other RNA
gtcaggtttgcagtagtagag

SEQ ID NO: 7370 - RNA, 21 nt, synthetic construct
  misc_feature 1..21: note = Synthetic
  source 1..21: mol_type = other RNA
tcaggtttgcagtagtagagt

SEQ ID NO: 7371 - RNA, 21 nt, synthetic construct
  misc_feature 1..21: note = Synthetic
  source 1..21: mol_type = other RNA
caggtttgcagtagtagagtt

SEQ ID NO: 7372 - RNA, 21 nt, synthetic construct
  misc_feature 1..21: note = Synthetic
  source 1..21: mol_type = other RNA
aggtttgcagtagtagagttg

SEQ ID NO: 7373 - RNA, 21 nt, synthetic construct
  misc_feature 1..21: note = Synthetic
  source 1..21: mol_type = other RNA
ggtttgcagtagtagagttgg

SEQ ID NO: 7374 - RNA, 21 nt, synthetic construct
  misc_feature 1..21: note = Synthetic
  source 1..21: mol_type = other RNA
gtttgcagtagtagagttggt

SEQ ID NO: 7375 - RNA, 21 nt, synthetic construct
  misc_feature 1..21: note = Synthetic
  source 1..21: mol_type = other RNA
tttgcagtagtagagttggta

SEQ ID NO: 7376 - RNA, 21 nt, synthetic construct
  misc_feature 1..21: note = Synthetic
  source 1..21: mol_type = other RNA
ttgcagtagtagagttggtag

SEQ ID NO: 7377 - RNA, 21 nt, synthetic construct
  misc_feature 1..21: note = Synthetic
  source 1..21: mol_type = other RNA
tgcagtagtagagttggtagc

SEQ ID NO: 7378 - RNA, 21 nt, synthetic construct
  misc_feature 1..21: note = Synthetic
  source 1..21: mol_type = other RNA
gcagtagtagagttggtagct

SEQ ID NO: 7379 - RNA, 21 nt, synthetic construct
  misc_feature 1..21: note = Synthetic
  source 1..21: mol_type = other RNA
cagtagtagagttggtagctc

SEQ ID NO: 7380 - RNA, 21 nt, synthetic construct
  misc_feature 1..21: note = Synthetic
  source 1..21: mol_type = other RNA
agtagtagagttggtagctcc

SEQ ID NO: 7381 - RNA, 21 nt, synthetic construct
  misc_feature 1..21: note = Synthetic
  source 1..21: mol_type = other RNA
gtagtagagttggtagctcca

SEQ ID NO: 7382 - RNA, 21 nt, synthetic construct
  misc_feature 1..21: note = Synthetic
  source 1..21: mol_type = other RNA
tagtagagttggtagctccat

SEQ ID NO: 7383 - RNA, 21 nt, synthetic construct
  misc_feature 1..21: note = Synthetic
  source 1..21: mol_type = other RNA
agtagagttggtagctccatc

SEQ ID NO: 7384 - RNA, 21 nt, synthetic construct
  misc_feature 1..21: note = Synthetic
  source 1..21: mol_type = other RNA
gtagagttggtagctccatca

SEQ ID NO: 7385 - RNA, 21 nt, synthetic construct
  misc_feature 1..21: note = Synthetic
  source 1..21: mol_type = other RNA
tagagttggtagctccatcag

SEQ ID NO: 7386 - RNA, 21 nt, synthetic construct
  misc_feature 1..21: note = Synthetic
  source 1..21: mol_type = other RNA
agagttggtagctccatcaga

SEQ ID NO: 7387 - RNA, 21 nt, synthetic construct
  misc_feature 1..21: note = Synthetic
  source 1..21: mol_type = other RNA
gagttggtagctccatcagag

SEQ ID NO: 7388 - RNA, 21 nt, synthetic construct
  misc_feature 1..21: note = Synthetic
  source 1..21: mol_type = other RNA
agttggtagctccatcagagt

SEQ ID NO: 7389 - RNA, 21 nt, synthetic construct
  misc_feature 1..21: note = Synthetic
  source 1..21: mol_type = other RNA
gttggtagctccatcagagtc

SEQ ID NO: 7390 - RNA, 21 nt, synthetic construct
  misc_feature 1..21: note = Synthetic
  source 1..21: mol_type = other RNA
ttggtagctccatcagagtct

SEQ ID NO: 7391 - RNA, 21 nt, synthetic construct
  misc_feature 1..21: note = Synthetic
  source 1..21: mol_type = other RNA
tggtagctccatcagagtcta

SEQ ID NO: 7392 - RNA, 21 nt, synthetic construct
  misc_feature 1..21: note = Synthetic
  source 1..21: mol_type = other RNA
ggtagctccatcagagtctac

SEQ ID NO: 7393 - RNA, 21 nt, synthetic construct
  misc_feature 1..21: note = Synthetic
  source 1..21: mol_type = other RNA
gtagctccatcagagtctact

SEQ ID NO: 7394 - RNA, 21 nt, synthetic construct
  misc_feature 1..21: note = Synthetic
  source 1..21: mol_type = other RNA
tagctccatcagagtctacta

SEQ ID NO: 7395 - RNA, 21 nt, synthetic construct
  misc_feature 1..21: note = Synthetic
  source 1..21: mol_type = other RNA
agctccatcagagtctactac

SEQ ID NO: 7396 - RNA, 21 nt, synthetic construct
  misc_feature 1..21: note = Synthetic
  source 1..21: mol_type = other RNA
gctccatcagagtctactaca

SEQ ID NO: 7397 - RNA, 21 nt, synthetic construct
  misc_feature 1..21: note = Synthetic
  source 1..21: mol_type = other RNA
ctccatcagagtctactacag

SEQ ID NO: 7398 - RNA, 21 nt, synthetic construct
  misc_feature 1..21: note = Synthetic
  source 1..21: mol_type = other RNA
tccatcagagtctactacagt

SEQ ID NO: 7399 - RNA, 21 nt, synthetic construct
  misc_feature 1..21: note = Synthetic
  source 1..21: mol_type = other RNA
ccatcagagtctactacagtc

SEQ ID NO: 7400 - RNA, 21 nt, synthetic construct
  misc_feature 1..21: note = Synthetic
  source 1..21: mol_type = other RNA
catcagagtctactacagtca

SEQ ID NO: 7401 - RNA, 21 nt, synthetic construct
  misc_feature 1..21: note = Synthetic
  source 1..21: mol_type = other RNA
atcagagtctactacagtcaa

SEQ ID NO: 7402 - RNA, 21 nt, synthetic construct
  misc_feature 1..21: note = Synthetic
  source 1..21: mol_type = other RNA
tcagagtctactacagtcaag

SEQ ID NO: 7403 - RNA, 21 nt, synthetic construct
  misc_feature 1..21: note = Synthetic
  source 1..21: mol_type = other RNA
cagagtctactacagtcaagc

SEQ ID NO: 7404 - RNA, 21 nt, synthetic construct
  misc_feature 1..21: note = Synthetic
  source 1..21: mol_type = other RNA
agagtctactacagtcaagct

SEQ ID NO: 7405 - RNA, 21 nt, synthetic construct
  misc_feature 1..21: note = Synthetic
  source 1..21: mol_type = other RNA
gagtctactacagtcaagctg

SEQ ID NO: 7406 - RNA, 21 nt, synthetic construct
  misc_feature 1..21: note = Synthetic
  source 1..21: mol_type = other RNA
agtctactacagtcaagctga

SEQ ID NO: 7407 - RNA, 21 nt, synthetic construct
  misc_feature 1..21: note = Synthetic
  source 1..21: mol_type = other RNA
gtctactacagtcaagctgaa

SEQ ID NO: 7408 - RNA, 21 nt, synthetic construct
  misc_feature 1..21: note = Synthetic
  source 1..21: mol_type = other RNA
tctactacagtcaagctgaaa

SEQ ID NO: 7409 - RNA, 21 nt, synthetic construct
  misc_feature 1..21: note = Synthetic
  source 1..21: mol_type = other RNA
ctactacagtcaagctgaaag

SEQ ID NO: 7410 - RNA, 21 nt, synthetic construct
  misc_feature 1..21: note = Synthetic
  source 1..21: mol_type = other RNA
tactacagtcaagctgaaagt

SEQ ID NO: 7411 - RNA, 21 nt, synthetic construct
  misc_feature 1..21: note = Synthetic
  source 1..21: mol_type = other RNA
actacagtcaagctgaaagtg

SEQ ID NO: 7412 - RNA, 21 nt, synthetic construct
  misc_feature 1..21: note = Synthetic
  source 1..21: mol_type = other RNA
ctacagtcaagctgaaagtgt

SEQ ID NO: 7413 - RNA, 21 nt, synthetic construct
  misc_feature 1..21: note = Synthetic
  source 1..21: mol_type = other RNA
tacagtcaagctgaaagtgta

SEQ ID NO: 7414 - RNA, 21 nt, synthetic construct
  misc_feature 1..21: note = Synthetic
  source 1..21: mol_type = other RNA
acagtcaagctgaaagtgtag

SEQ ID NO: 7415 - RNA, 21 nt, synthetic construct
  misc_feature 1..21: note = Synthetic
  source 1..21: mol_type = other RNA
cagtcaagctgaaagtgtagt

SEQ ID NO: 7416 - RNA, 21 nt, synthetic construct
  misc_feature 1..21: note = Synthetic
  source 1..21: mol_type = other RNA
agtcaagctgaaagtgtagtt

SEQ ID NO: 7417 - RNA, 21 nt, synthetic construct
  misc_feature 1..21: note = Synthetic
  source 1..21: mol_type = other RNA
gtcaagctgaaagtgtagttc

SEQ ID NO: 7418 - RNA, 21 nt, synthetic construct
  misc_feature 1..21: note = Synthetic
  source 1..21: mol_type = other RNA
tcaagctgaaagtgtagttcc

SEQ ID NO: 7419 - RNA, 21 nt, synthetic construct
  misc_feature 1..21: note = Synthetic
  source 1..21: mol_type = other RNA
caagctgaaagtgtagttccc

SEQ ID NO: 7420 - RNA, 21 nt, synthetic construct
  misc_feature 1..21: note = Synthetic
  source 1..21: mol_type = other RNA
aagctgaaagtgtagttccca

SEQ ID NO: 7421 - RNA, 21 nt, synthetic construct
  misc_feature 1..21: note = Synthetic
  source 1..21: mol_type = other RNA
agctgaaagtgtagttcccag

SEQ ID NO: 7422 - RNA, 21 nt, synthetic construct
  misc_feature 1..21: note = Synthetic
  source 1..21: mol_type = other RNA
gctgaaagtgtagttcccagg

SEQ ID NO: 7423 - RNA, 21 nt, synthetic construct
  misc_feature 1..21: note = Synthetic
  source 1..21: mol_type = other RNA
ctgaaagtgtagttcccaggg

SEQ ID NO: 7424 - RNA, 21 nt, synthetic construct
  misc_feature 1..21: note = Synthetic
  source 1..21: mol_type = other RNA
tgaaagtgtagttcccaggga

SEQ ID NO: 7425 - RNA, 21 nt, synthetic construct
  misc_feature 1..21: note = Synthetic
  source 1..21: mol_type = other RNA
gaaagtgtagttcccagggac

SEQ ID NO: 7426 - RNA, 21 nt, synthetic construct
  misc_feature 1..21: note = Synthetic
  source 1..21: mol_type = other RNA
aaagtgtagttcccagggacg

SEQ ID NO: 7427 - RNA, 21 nt, synthetic construct
  misc_feature 1..21: note = Synthetic
  source 1..21: mol_type = other RNA
aagtgtagttcccagggacga

SEQ ID NO: 7428 - RNA, 21 nt, synthetic construct
  misc_feature 1..21: note = Synthetic
  source 1..21: mol_type = other RNA
agtgtagttcccagggacgag

SEQ ID NO: 7429 - RNA, 21 nt, synthetic construct
  misc_feature 1..21: note = Synthetic
  source 1..21: mol_type = other RNA
gtgtagttcccagggacgagt

SEQ ID NO: 7430 - RNA, 21 nt, synthetic construct
  misc_feature 1..21: note = Synthetic
  source 1..21: mol_type = other RNA
tgtagttcccagggacgagtt

SEQ ID NO: 7431 - RNA, 21 nt, synthetic construct
  misc_feature 1..21: note = Synthetic
  source 1..21: mol_type = other RNA
gtagttcccagggacgagttt

SEQ ID NO: 7432 - RNA, 21 nt, synthetic construct
  misc_feature 1..21: note = Synthetic
  source 1..21: mol_type = other RNA
tagttcccagggacgagttta

SEQ ID NO: 7433 - RNA, 21 nt, synthetic construct
  misc_feature 1..21: note = Synthetic
  source 1..21: mol_type = other RNA
agttcccagggacgagtttac

SEQ ID NO: 7434 - RNA, 21 nt, synthetic construct
  misc_feature 1..21: note = Synthetic
  source 1..21: mol_type = other RNA
gttcccagggacgagtttact

SEQ ID NO: 7435 - RNA, 21 nt, synthetic construct
  misc_feature 1..21: note = Synthetic
  source 1..21: mol_type = other RNA
ttcccagggacgagtttactt

SEQ ID NO: 7436 - RNA, 21 nt, synthetic construct
  misc_feature 1..21: note = Synthetic
  source 1..21: mol_type = other RNA
tcccagggacgagtttactta

SEQ ID NO: 7437 - RNA, 21 nt, synthetic construct
  misc_feature 1..21: note = Synthetic
  source 1..21: mol_type = other RNA
cccagggacgagtttacttag

SEQ ID NO: 7438 - RNA, 21 nt, synthetic construct
  misc_feature 1..21: note = Synthetic
  source 1..21: mol_type = other RNA
ccagggacgagtttacttagt

SEQ ID NO: 7439 - RNA, 21 nt, synthetic construct
  misc_feature 1..21: note = Synthetic
  source 1..21: mol_type = other RNA
cagggacgagtttacttagtt

SEQ ID NO: 7440 - RNA, 21 nt, synthetic construct
  misc_feature 1..21: note = Synthetic
  source 1..21: mol_type = other RNA
agggacgagtttacttagttt

SEQ ID NO: 7441 - RNA, 21 nt, synthetic construct
  misc_feature 1..21: note = Synthetic
  source 1..21: mol_type = other RNA
gggacgagtttacttagtttt

SEQ ID NO: 7442 - RNA, 21 nt, synthetic construct
  misc_feature 1..21: note = Synthetic
  source 1..21: mol_type = other RNA
ggacgagtttacttagtttta

SEQ ID NO: 7443 - RNA, 21 nt, synthetic construct
  misc_feature 1..21: note = Synthetic
  source 1..21: mol_type = other RNA
gacgagtttacttagttttaa

SEQ ID NO: 7444 - RNA, 21 nt, synthetic construct
  misc_feature 1..21: note = Synthetic
  source 1..21: mol_type = other RNA
acgagtttacttagttttaat

SEQ ID NO: 7445 - RNA, 21 nt, synthetic construct
  misc_feature 1..21: note = Synthetic
  source 1..21: mol_type = other RNA
cgagtttacttagttttaata

SEQ ID NO: 7446 - RNA, 21 nt, synthetic construct
  misc_feature 1..21: note = Synthetic
  source 1..21: mol_type = other RNA
gagtttacttagttttaatat

SEQ ID NO: 7447 - RNA, 21 nt, synthetic construct
  misc_feature 1..21: note = Synthetic
  source 1..21: mol_type = other RNA
agtttacttagttttaatatg

SEQ ID NO: 7448 - RNA, 21 nt, synthetic construct
  misc_feature 1..21: note = Synthetic
  source 1..21: mol_type = other RNA
gtttacttagttttaatatgg

SEQ ID NO: 7449 - RNA, 21 nt, synthetic construct
  misc_feature 1..21: note = Synthetic
  source 1..21: mol_type = other RNA
tttacttagttttaatatggc

SEQ ID NO: 7450 - RNA, 21 nt, synthetic construct
  misc_feature 1..21: note = Synthetic
  source 1..21: mol_type = other RNA
ttacttagttttaatatggct

SEQ ID NO: 7451 - RNA, 21 nt, synthetic construct
  misc_feature 1..21: note = Synthetic
  source 1..21: mol_type = other RNA
tacttagttttaatatggctg

SEQ ID NO: 7452 - RNA, 21 nt, synthetic construct
  misc_feature 1..21: note = Synthetic
  source 1..21: mol_type = other RNA
acttagttttaatatggctgt

SEQ ID NO: 7453 - RNA, 21 nt, synthetic construct
  misc_feature 1..21: note = Synthetic
  source 1..21: mol_type = other RNA
cttagttttaatatggctgta

SEQ ID NO: 7454 - RNA, 21 nt, synthetic construct
  misc_feature 1..21: note = Synthetic
  source 1..21: mol_type = other RNA
ttagttttaatatggctgtat

SEQ ID NO: 7455 - RNA, 21 nt, synthetic construct
  misc_feature 1..21: note = Synthetic
  source 1..21: mol_type = other RNA
tagttttaatatggctgtatc

SEQ ID NO: 7456 - RNA, 21 nt, synthetic construct
  misc_feature 1..21: note = Synthetic
  source 1..21: mol_type = other RNA
agttttaatatggctgtatct

SEQ ID NO: 7457 - RNA, 21 nt, synthetic construct
  misc_feature 1..21: note = Synthetic
  source 1..21: mol_type = other RNA
gttttaatatggctgtatctt

SEQ ID NO: 7458 - RNA, 21 nt, synthetic construct
  misc_feature 1..21: note = Synthetic
  source 1..21: mol_type = other RNA
ttttaatatggctgtatcttc

SEQ ID NO: 7459 - RNA, 21 nt, synthetic construct
  misc_feature 1..21: note = Synthetic
  source 1..21: mol_type = other RNA
tttaatatggctgtatcttca

SEQ ID NO: 7460 - RNA, 21 nt, synthetic construct
  misc_feature 1..21: note = Synthetic
  source 1..21: mol_type = other RNA
ttaatatggctgtatcttcag

SEQ ID NO: 7461 - RNA, 21 nt, synthetic construct
  misc_feature 1..21: note = Synthetic
  source 1..21: mol_type = other RNA
taatatggctgtatcttcaga

SEQ ID NO: 7462 - RNA, 21 nt, synthetic construct
  misc_feature 1..21: note = Synthetic
  source 1..21: mol_type = other RNA
aatatggctgtatcttcagaa

SEQ ID NO: 7463 - RNA, 21 nt, synthetic construct
  misc_feature 1..21: note = Synthetic
  source 1..21: mol_type = other RNA
atatggctgtatcttcagaaa

SEQ ID NO: 7464 - RNA, 21 nt, synthetic construct
  misc_feature 1..21: note = Synthetic
  source 1..21: mol_type = other RNA
tatggctgtatcttcagaaat

SEQ ID NO: 7465 - RNA, 21 nt, synthetic construct
  misc_feature 1..21: note = Synthetic
  source 1..21: mol_type = other RNA
atggctgtatcttcagaaatc

SEQ ID NO: 7466 - RNA, 21 nt, synthetic construct
  misc_feature 1..21: note = Synthetic
  source 1..21: mol_type = other RNA
tggctgtatcttcagaaatct

SEQ ID NO: 7467 - RNA, 21 nt, synthetic construct
  misc_feature 1..21: note = Synthetic
  source 1..21: mol_type = other RNA
ggctgtatcttcagaaatctt

SEQ ID NO: 7468 - RNA, 21 nt, synthetic construct
  misc_feature 1..21: note = Synthetic
  source 1..21: mol_type = other RNA
gctgtatcttcagaaatcttc

SEQ ID NO: 7469 - RNA, 21 nt, synthetic construct
  misc_feature 1..21: note = Synthetic
  source 1..21: mol_type = other RNA
ctgtatcttcagaaatcttct

SEQ ID NO: 7470 - RNA, 21 nt, synthetic construct
  misc_feature 1..21: note = Synthetic
  source 1..21: mol_type = other RNA
tgtatcttcagaaatcttctc

SEQ ID NO: 7471 - RNA, 21 nt, synthetic construct
  misc_feature 1..21: note = Synthetic
  source 1..21: mol_type = other RNA
gtatcttcagaaatcttctct

SEQ ID NO: 7472 - RNA, 21 nt, synthetic construct
  misc_feature 1..21: note = Synthetic
  source 1..21: mol_type = other RNA
tatcttcagaaatcttctctt

SEQ ID NO: 7473 - RNA, 21 nt, synthetic construct
  misc_feature 1..21: note = Synthetic
  source 1..21: mol_type = other RNA
atcttcagaaatcttctcttc

SEQ ID NO: 7474 - RNA, 21 nt, synthetic construct
  misc_feature 1..21: note = Synthetic
  source 1..21: mol_type = other RNA
tcttcagaaatcttctcttct

SEQ ID NO: 7475 - RNA, 21 nt, synthetic construct
  misc_feature 1..21: note = Synthetic
  source 1..21: mol_type = other RNA
cttcagaaatcttctcttctc

SEQ ID NO: 7476 - RNA, 21 nt, synthetic construct
  misc_feature 1..21: note = Synthetic
  source 1..21: mol_type = other RNA
ttcagaaatcttctcttctct

SEQ ID NO: 7477 - RNA, 21 nt, synthetic construct
  misc_feature 1..21: note = Synthetic
  source 1..21: mol_type = other RNA
tcagaaatcttctcttctctt

SEQ ID NO: 7478 - RNA, 21 nt, synthetic construct
  misc_feature 1..21: note = Synthetic
  source 1..21: mol_type = other RNA
cagaaatcttctcttctctta

SEQ ID NO: 7479 - RNA, 21 nt, synthetic construct
  misc_feature 1..21: note = Synthetic
  source 1..21: mol_type = other RNA
agaaatcttctcttctcttag

SEQ ID NO: 7480 - RNA, 21 nt, synthetic construct
  misc_feature 1..21: note = Synthetic
  source 1..21: mol_type = other RNA
gaaatcttctcttctcttaga

SEQ ID NO: 7481 - RNA, 21 nt, synthetic construct
  misc_feature 1..21: note = Synthetic
  source 1..21: mol_type = other RNA
aaatcttctcttctcttagag

SEQ ID NO: 7482 - RNA, 21 nt, synthetic construct
  misc_feature 1..21: note = Synthetic
  source 1..21: mol_type = other RNA
aatcttctcttctcttagagg

SEQ ID NO: 7483 - RNA, 21 nt, synthetic construct
  misc_feature 1..21: note = Synthetic
  source 1..21: mol_type = other RNA
atcttctcttctcttagaggc

SEQ ID NO: 7484 - RNA, 21 nt, synthetic construct
  misc_feature 1..21: note = Synthetic
  source 1..21: mol_type = other RNA
tcttctcttctcttagaggcc

SEQ ID NO: 7485 - RNA, 21 nt, synthetic construct
  misc_feature 1..21: note = Synthetic
  source 1..21: mol_type = other RNA
cttctcttctcttagaggccc

SEQ ID NO: 7486 - RNA, 21 nt, synthetic construct
  misc_feature 1..21: note = Synthetic
  source 1..21: mol_type = other RNA
ttctcttctcttagaggcccc

SEQ ID NO: 7487 - RNA, 21 nt, synthetic construct
  misc_feature 1..21: note = Synthetic
  source 1..21: mol_type = other RNA
tctcttctcttagaggcccct

SEQ ID NO: 7488 - RNA, 21 nt, synthetic construct
  misc_feature 1..21: note = Synthetic
  source 1..21: mol_type = other RNA
ctcttctcttagaggcccctt

SEQ ID NO: 7489 - RNA, 21 nt, synthetic construct
  misc_feature 1..21: note = Synthetic
  source 1..21: mol_type = other RNA
tcttctcttagaggcccctta

SEQ ID NO: 7490 - RNA, 21 nt, synthetic construct
  misc_feature 1..21: note = Synthetic
  source 1..21: mol_type = other RNA
cttctcttagaggccccttaa

SEQ ID NO: 7491 - RNA, 21 nt, synthetic construct
  misc_feature 1..21: note = Synthetic
  source 1..21: mol_type = other RNA
ttctcttagaggccccttaag

SEQ ID NO: 7492 - RNA, 21 nt, synthetic construct
  misc_feature 1..21: note = Synthetic
  source 1..21: mol_type = other RNA
tctcttagaggccccttaagt

SEQ ID NO: 7493 - RNA, 21 nt, synthetic construct
  misc_feature 1..21: note = Synthetic
  source 1..21: mol_type = other RNA
ctcttagaggccccttaagtt

SEQ ID NO: 7494 - RNA, 21 nt, synthetic construct
  misc_feature 1..21: note = Synthetic
  source 1..21: mol_type = other RNA
tcttagaggccccttaagttc

SEQ ID NO: 7495 - RNA, 21 nt, synthetic construct
  misc_feature 1..21: note = Synthetic
  source 1..21: mol_type = other RNA
cttagaggccccttaagttct

SEQ ID NO: 7496 - RNA, 21 nt, synthetic construct
  misc_feature 1..21: note = Synthetic
  source 1..21: mol_type = other RNA
ttagaggccccttaagttctt

SEQ ID NO: 7497 - RNA, 21 nt, synthetic construct
  misc_feature 1..21: note = Synthetic
  source 1..21: mol_type = other RNA
tagaggccccttaagttcttc

SEQ ID NO: 7498 - RNA, 21 nt, synthetic construct
  misc_feature 1..21: note = Synthetic
  source 1..21: mol_type = other RNA
agaggccccttaagttcttcc

SEQ ID NO: 7499 - RNA, 21 nt, synthetic construct
  misc_feature 1..21: note = Synthetic
  source 1..21: mol_type = other RNA
gaggccccttaagttcttccc

SEQ ID NO: 7500 - RNA, 21 nt, synthetic construct
  misc_feature 1..21: note = Synthetic
  source 1..21: mol_type = other RNA
aggccccttaagttcttccca

SEQ ID NO: 7501 - RNA, 21 nt, synthetic construct
  misc_feature 1..21: note = Synthetic
  source 1..21: mol_type = other RNA
ggccccttaagttcttcccaa

SEQ ID NO: 7502 - RNA, 21 nt, synthetic construct
  misc_feature 1..21: note = Synthetic
  source 1..21: mol_type = other RNA
gccccttaagttcttcccaat

SEQ ID NO: 7503 - RNA, 21 nt, synthetic construct
  misc_feature 1..21: note = Synthetic
  source 1..21: mol_type = other RNA
ccccttaagttcttcccaatg

SEQ ID NO: 7504 - RNA, 21 nt, synthetic construct
  misc_feature 1..21: note = Synthetic
  source 1..21: mol_type = other RNA
cccttaagttcttcccaatgg

SEQ ID NO: 7505 - RNA, 21 nt, synthetic construct
  misc_feature 1..21: note = Synthetic
  source 1..21: mol_type = other RNA
ccttaagttcttcccaatggt

SEQ ID NO: 7506 - RNA, 21 nt, synthetic construct
  misc_feature 1..21: note = Synthetic
  source 1..21: mol_type = other RNA
cttaagttcttcccaatggta

SEQ ID NO: 7507 - RNA, 21 nt, synthetic construct
  misc_feature 1..21: note = Synthetic
  source 1..21: mol_type = other RNA
ttaagttcttcccaatggtac

SEQ ID NO: 7508 - RNA, 21 nt, synthetic construct
  misc_feature 1..21: note = Synthetic
  source 1..21: mol_type = other RNA
taagttcttcccaatggtact

SEQ ID NO: 7509 - RNA, 21 nt, synthetic construct
  misc_feature 1..21: note = Synthetic
  source 1..21: mol_type = other RNA
aagttcttcccaatggtactg

SEQ ID NO: 7510 - RNA, 21 nt, synthetic construct
  misc_feature 1..21: note = Synthetic
  source 1..21: mol_type = other RNA
agttcttcccaatggtactga

SEQ ID NO: 7511 - RNA, 21 nt, synthetic construct
  misc_feature 1..21: note = Synthetic
  source 1..21: mol_type = other RNA
gttcttcccaatggtactgaa

SEQ ID NO: 7512 - RNA, 21 nt, synthetic construct
  misc_feature 1..21: note = Synthetic
  source 1..21: mol_type = other RNA
ttcttcccaatggtactgaac

SEQ ID NO: 7513 - RNA, 21 nt, synthetic construct
  misc_feature 1..21: note = Synthetic
  source 1..21: mol_type = other RNA
tcttcccaatggtactgaacg

SEQ ID NO: 7514 - RNA, 21 nt, synthetic construct
  misc_feature 1..21: note = Synthetic
  source 1..21: mol_type = other RNA
cttcccaatggtactgaacga

SEQ ID NO: 7515 - RNA, 21 nt, synthetic construct
  misc_feature 1..21: note = Synthetic
  source 1..21: mol_type = other RNA
ttcccaatggtactgaacgat

SEQ ID NO: 7516 - RNA, 21 nt, synthetic construct
  misc_feature 1..21: note = Synthetic
  source 1..21: mol_type = other RNA
tcccaatggtactgaacgatt

SEQ ID NO: 7517 - RNA, 21 nt, synthetic construct
  misc_feature 1..21: note = Synthetic
  source 1..21: mol_type = other RNA
cccaatggtactgaacgattt

SEQ ID NO: 7518 - RNA, 21 nt, synthetic construct
  misc_feature 1..21: note = Synthetic
  source 1..21: mol_type = other RNA
ccaatggtactgaacgatttt

SEQ ID NO: 7519 - RNA, 21 nt, synthetic construct
  misc_feature 1..21: note = Synthetic
  source 1..21: mol_type = other RNA
caatggtactgaacgatttta

SEQ ID NO: 7520 - RNA, 21 nt, synthetic construct
  misc_feature 1..21: note = Synthetic
  source 1..21: mol_type = other RNA
aatggtactgaacgattttat

SEQ ID NO: 7521 - RNA, 21 nt, synthetic construct
  misc_feature 1..21: note = Synthetic
  source 1..21: mol_type = other RNA
atggtactgaacgattttatc

SEQ ID NO: 7522 - RNA, 21 nt, synthetic construct
  misc_feature 1..21: note = Synthetic
  source 1..21: mol_type = other RNA
tggtactgaacgattttatca

SEQ ID NO: 7523 - RNA, 21 nt, synthetic construct
  misc_feature 1..21: note = Synthetic
  source 1..21: mol_type = other RNA
ggtactgaacgattttatcat

SEQ ID NO: 7524 - RNA, 21 nt, synthetic construct
  misc_feature 1..21: note = Synthetic
  source 1..21: mol_type = other RNA
gtactgaacgattttatcatc

SEQ ID NO: 7525 - RNA, 21 nt, synthetic construct
  misc_feature 1..21: note = Synthetic
  source 1..21: mol_type = other RNA
tactgaacgattttatcatca

SEQ ID NO: 7526 - RNA, 21 nt, synthetic construct
  misc_feature 1..21: note = Synthetic
  source 1..21: mol_type = other RNA
actgaacgattttatcatcat

SEQ ID NO: 7527 - RNA, 21 nt, synthetic construct
  misc_feature 1..21: note = Synthetic
  source 1..21: mol_type = other RNA
ctgaacgattttatcatcatc

SEQ ID NO: 7528 - RNA, 21 nt, synthetic construct
  misc_feature 1..21: note = Synthetic
  source 1..21: mol_type = other RNA
tgaacgattttatcatcatca

SEQ ID NO: 7529 - RNA, 21 nt, synthetic construct
  misc_feature 1..21: note = Synthetic
  source 1..21: mol_type = other RNA
gaacgattttatcatcatcag

SEQ ID NO: 7530 - RNA, 21 nt, synthetic construct
  misc_feature 1..21: note = Synthetic
  source 1..21: mol_type = other RNA
aacgattttatcatcatcagt

SEQ ID NO: 7531 - RNA, 21 nt, synthetic construct
  misc_feature 1..21: note = Synthetic
  source 1..21: mol_type = other RNA
acgattttatcatcatcagtg

SEQ ID NO: 7532 - RNA, 21 nt, synthetic construct
  misc_feature 1..21: note = Synthetic
  source 1..21: mol_type = other RNA
cgattttatcatcatcagtgc

SEQ ID NO: 7533 - RNA, 21 nt, synthetic construct
  misc_feature 1..21: note = Synthetic
  source 1..21: mol_type = other RNA
gattttatcatcatcagtgct

SEQ ID NO: 7534 - RNA, 21 nt, synthetic construct
  misc_feature 1..21: note = Synthetic
  source 1..21: mol_type = other RNA
attttatcatcatcagtgctt

SEQ ID NO: 7535 - RNA, 21 nt, synthetic construct
  misc_feature 1..21: note = Synthetic
  source 1..21: mol_type = other RNA
ttttatcatcatcagtgcttt

SEQ ID NO: 7536 - RNA, 21 nt, synthetic construct
  misc_feature 1..21: note = Synthetic
  source 1..21: mol_type = other RNA
tttatcatcatcagtgctttg

SEQ ID NO: 7537 - RNA, 21 nt, synthetic construct
  misc_feature 1..21: note = Synthetic
  source 1..21: mol_type = other RNA
ttatcatcatcagtgctttga

SEQ ID NO: 7538 - RNA, 21 nt, synthetic construct
  misc_feature 1..21: note = Synthetic
  source 1..21: mol_type = other RNA
tatcatcatcagtgctttgac

SEQ ID NO: 7539 - RNA, 21 nt, synthetic construct
  misc_feature 1..21: note = Synthetic
  source 1..21: mol_type = other RNA
atcatcatcagtgctttgact

SEQ ID NO: 7540 - RNA, 21 nt, synthetic construct
  misc_feature 1..21: note = Synthetic
  source 1..21: mol_type = other RNA
tcatcatcagtgctttgactg

SEQ ID NO: 7541 - RNA, 21 nt, synthetic construct
  misc_feature 1..21: note = Synthetic
  source 1..21: mol_type = other RNA
catcatcagtgctttgactgc

SEQ ID NO: 7542 - RNA, 21 nt, synthetic construct
  misc_feature 1..21: note = Synthetic
  source 1..21: mol_type = other RNA
atcatcagtgctttgactgcc

SEQ ID NO: 7543 - RNA, 21 nt, synthetic construct
  misc_feature 1..21: note = Synthetic
  source 1..21: mol_type = other RNA
tcatcagtgctttgactgcca

SEQ ID NO: 7544 - RNA, 21 nt, synthetic construct
  misc_feature 1..21: note = Synthetic
  source 1..21: mol_type = other RNA
catcagtgctttgactgccat

SEQ ID NO: 7545 - RNA, 21 nt, synthetic construct
  misc_feature 1..21: note = Synthetic
  source 1..21: mol_type = other RNA
atcagtgctttgactgccatc

SEQ ID NO: 7546 - RNA, 21 nt, synthetic construct
  misc_feature 1..21: note = Synthetic
  source 1..21: mol_type = other RNA
tcagtgctttgactgccatca

SEQ ID NO: 7547 - RNA, 21 nt, synthetic construct
  misc_feature 1..21: note = Synthetic
  source 1..21: mol_type = other RNA
cagtgctttgactgccatcaa

SEQ ID NO: 7548 - RNA, 21 nt, synthetic construct
  misc_feature 1..21: note = Synthetic
  source 1..21: mol_type = other RNA
agtgctttgactgccatcaat

SEQ ID NO: 7549 - RNA, 21 nt, synthetic construct
  misc_feature 1..21: note = Synthetic
  source 1..21: mol_type = other RNA
gtgctttgactgccatcaatg

SEQ ID NO: 7550 - RNA, 21 nt, synthetic construct
  misc_feature 1..21: note = Synthetic
  source 1..21: mol_type = other RNA
tgctttgactgccatcaatga

SEQ ID NO: 7551 - RNA, 21 nt, synthetic construct
  misc_feature 1..21: note = Synthetic
  source 1..21: mol_type = other RNA
gctttgactgccatcaatgac

SEQ ID NO: 7552 - RNA, 21 nt, synthetic construct
  misc_feature 1..21: note = Synthetic
  source 1..21: mol_type = other RNA
ctttgactgccatcaatgact

SEQ ID NO: 7553 - RNA, 21 nt, synthetic construct
  misc_feature 1..21: note = Synthetic
  source 1..21: mol_type = other RNA
tttgactgccatcaatgactg

SEQ ID NO: 7554 - RNA, 21 nt, synthetic construct
  misc_feature 1..21: note = Synthetic
  source 1..21: mol_type = other RNA
ttgactgccatcaatgactgt

SEQ ID NO: 7555 - RNA, 21 nt, synthetic construct
  misc_feature 1..21: note = Synthetic
  source 1..21: mol_type = other RNA
tgactgccatcaatgactgta

SEQ ID NO: 7556 - RNA, 21 nt, synthetic construct
  misc_feature 1..21: note = Synthetic
  source 1..21: mol_type = other RNA
gactgccatcaatgactgtag

SEQ ID NO: 7557 - RNA, 21 nt, synthetic construct
  misc_feature 1..21: note = Synthetic
  source 1..21: mol_type = other RNA
actgccatcaatgactgtaga

SEQ ID NO: 7558 - RNA, 21 nt, synthetic construct
  misc_feature 1..21: note = Synthetic
  source 1..21: mol_type = other RNA
ctgccatcaatgactgtagaa

SEQ ID NO: 7559 - RNA, 21 nt, synthetic construct
  misc_feature 1..21: note = Synthetic
  source 1..21: mol_type = other RNA
tgccatcaatgactgtagaag

SEQ ID NO: 7560 - RNA, 21 nt, synthetic construct
  misc_feature 1..21: note = Synthetic
  source 1..21: mol_type = other RNA
gccatcaatgactgtagaagt

SEQ ID NO: 7561 - RNA, 21 nt, synthetic construct
  misc_feature 1..21: note = Synthetic
  source 1..21: mol_type = other RNA
ccatcaatgactgtagaagtg

SEQ ID NO: 7562 - RNA, 21 nt, synthetic construct
  misc_feature 1..21: note = Synthetic
  source 1..21: mol_type = other RNA
catcaatgactgtagaagtgg

SEQ ID NO: 7563 - RNA, 21 nt, synthetic construct
  misc_feature 1..21: note = Synthetic
  source 1..21: mol_type = other RNA
atcaatgactgtagaagtggt

SEQ ID NO: 7564 - RNA, 21 nt, synthetic construct
  misc_feature 1..21: note = Synthetic
  source 1..21: mol_type = other RNA
tcaatgactgtagaagtggtt

SEQ ID NO: 7565 - RNA, 21 nt, synthetic construct
  misc_feature 1..21: note = Synthetic
  source 1..21: mol_type = other RNA
caatgactgtagaagtggttg

SEQ ID NO: 7566 - RNA, 21 nt, synthetic construct
  misc_feature 1..21: note = Synthetic
  source 1..21: mol_type = other RNA
aatgactgtagaagtggttgg

SEQ ID NO: 7567 - RNA, 21 nt, synthetic construct
  misc_feature 1..21: note = Synthetic
  source 1..21: mol_type = other RNA
atgactgtagaagtggttggc

SEQ ID NO: 7568 - RNA, 21 nt, synthetic construct
  misc_feature 1..21: note = Synthetic
  source 1..21: mol_type = other RNA
tgactgtagaagtggttggca

SEQ ID NO: 7569 - RNA, 21 nt, synthetic construct
  misc_feature 1..21: note = Synthetic
  source 1..21: mol_type = other RNA
gactgtagaagtggttggcaa

SEQ ID NO: 7570 - RNA, 21 nt, synthetic construct
  misc_feature 1..21: note = Synthetic
  source 1..21: mol_type = other RNA
actgtagaagtggttggcaaa

SEQ ID NO: 7571 - RNA, 21 nt, synthetic construct
  misc_feature 1..21: note = Synthetic
  source 1..21: mol_type = other RNA
ctgtagaagtggttggcaaag

SEQ ID NO: 7572 - RNA, 21 nt, synthetic construct
  misc_feature 1..21: note = Synthetic
  source 1..21: mol_type = other RNA
tgtagaagtggttggcaaaga

SEQ ID NO: 7573 - RNA, 21 nt, synthetic construct
  misc_feature 1..21: note = Synthetic
  source 1..21: mol_type = other RNA
gtagaagtggttggcaaagag

SEQ ID NO: 7574 - RNA, 21 nt, synthetic construct
  misc_feature 1..21: note = Synthetic
  source 1..21: mol_type = other RNA
tagaagtggttggcaaagaga

SEQ ID NO: 7575 - RNA, 21 nt, synthetic construct
  misc_feature 1..21: note = Synthetic
  source 1..21: mol_type = other RNA
agaagtggttggcaaagagat

SEQ ID NO: 7576 - RNA, 21 nt, synthetic construct
  misc_feature 1..21: note = Synthetic
  source 1..21: mol_type = other RNA
gaagtggttggcaaagagatc

SEQ ID NO: 7577 - RNA, 21 nt, synthetic construct
  misc_feature 1..21: note = Synthetic
  source 1..21: mol_type = other RNA
aagtggttggcaaagagatct

SEQ ID NO: 7578 - RNA, 21 nt, synthetic construct
  misc_feature 1..21: note = Synthetic
  source 1..21: mol_type = other RNA
agtggttggcaaagagatctc

SEQ ID NO: 7579 - RNA, 21 nt, synthetic construct
  misc_feature 1..21: note = Synthetic
  source 1..21: mol_type = other RNA
gtggttggcaaagagatctcc

SEQ ID NO: 7580 - RNA, 21 nt, synthetic construct
  misc_feature 1..21: note = Synthetic
  source 1..21: mol_type = other RNA
tggttggcaaagagatctcct

SEQ ID NO: 7581 - RNA, 21 nt, synthetic construct
  misc_feature 1..21: note = Synthetic
  source 1..21: mol_type = other RNA
ggttggcaaagagatctcctg

SEQ ID NO: 7582 - RNA, 21 nt, synthetic construct
  misc_feature 1..21: note = Synthetic
  source 1..21: mol_type = other RNA
gttggcaaagagatctcctgg

SEQ ID NO: 7583 - RNA, 21 nt, synthetic construct
  misc_feature 1..21: note = Synthetic
  source 1..21: mol_type = other RNA
ttggcaaagagatctcctgga

SEQ ID NO: 7584 - RNA, 21 nt, synthetic construct
  misc_feature 1..21: note = Synthetic
  source 1..21: mol_type = other RNA
tggcaaagagatctcctggaa

SEQ ID NO: 7585 - RNA, 21 nt, synthetic construct
  misc_feature 1..21: note = Synthetic
  source 1..21: mol_type = other RNA
ggcaaagagatctcctggaac

SEQ ID NO: 7586 - RNA, 21 nt, synthetic construct
  misc_feature 1..21: note = Synthetic
  source 1..21: mol_type = other RNA
gcaaagagatctcctggaact

SEQ ID NO: 7587 - RNA, 21 nt, synthetic construct
  misc_feature 1..21: note = Synthetic
  source 1..21: mol_type = other RNA
caaagagatctcctggaactg

SEQ ID NO: 7588 - RNA, 21 nt, synthetic construct
  misc_feature 1..21: note = Synthetic
  source 1..21: mol_type = other RNA
aaagagatctcctggaactga

SEQ ID NO: 7589 - RNA, 21 nt, synthetic construct
  misc_feature 1..21: note = Synthetic
  source 1..21: mol_type = other RNA
aagagatctcctggaactgag

SEQ ID NO: 7590 - RNA, 21 nt, synthetic construct
  misc_feature 1..21: note = Synthetic
  source 1..21: mol_type = other RNA
agagatctcctggaactgagg

SEQ ID NO: 7591 - RNA, 21 nt, synthetic construct
  misc_feature 1..21: note = Synthetic
  source 1..21: mol_type = other RNA
gagatctcctggaactgaggt

SEQ ID NO: 7592 - RNA, 21 nt, synthetic construct
  misc_feature 1..21: note = Synthetic
  source 1..21: mol_type = other RNA
agatctcctggaactgaggtg

SEQ ID NO: 7593 - RNA, 21 nt, synthetic construct
  misc_feature 1..21: note = Synthetic
  source 1..21: mol_type = other RNA
gatctcctggaactgaggtga

SEQ ID NO: 7594 - RNA, 21 nt, synthetic construct
  misc_feature 1..21: note = Synthetic
  source 1..21: mol_type = other RNA
atctcctggaactgaggtgac

SEQ ID NO: 7595 - RNA, 21 nt, synthetic construct
  misc_feature 1..21: note = Synthetic
  source 1..21: mol_type = other RNA
tctcctggaactgaggtgaca

SEQ ID NO: 7596 - RNA, 21 nt, synthetic construct
  misc_feature 1..21: note = Synthetic
  source 1..21: mol_type = other RNA
ctcctggaactgaggtgacac

SEQ ID NO: 7597 - RNA, 21 nt, synthetic construct
  misc_feature 1..21: note = Synthetic
  source 1..21: mol_type = other RNA
tcctggaactgaggtgacaca

SEQ ID NO: 7598 - RNA, 21 nt, synthetic construct
  misc_feature 1..21: note = Synthetic
  source 1..21: mol_type = other RNA
cctggaactgaggtgacacaa

SEQ ID NO: 7599 - RNA, 21 nt, synthetic construct
  misc_feature 1..21: note = Synthetic
  source 1..21: mol_type = other RNA
ctggaactgaggtgacacaat

SEQ ID NO: 7600 - RNA, 21 nt, synthetic construct
  misc_feature 1..21: note = Synthetic
  source 1..21: mol_type = other RNA
tggaactgaggtgacacaata

SEQ ID NO: 7601 - RNA, 21 nt, synthetic construct
  misc_feature 1..21: note = Synthetic
  source 1..21: mol_type = other RNA
ggaactgaggtgacacaatag

SEQ ID NO: 7602 - RNA, 21 nt, synthetic construct
  misc_feature 1..21: note = Synthetic
  source 1..21: mol_type = other RNA
gaactgaggtgacacaatagc

SEQ ID NO: 7603 - RNA, 21 nt, synthetic construct
  misc_feature 1..21: note = Synthetic
  source 1..21: mol_type = other RNA
aactgaggtgacacaatagca

SEQ ID NO: 7604 - RNA, 21 nt, synthetic construct
  misc_feature 1..21: note = Synthetic
  source 1..21: mol_type = other RNA
actgaggtgacacaatagcaa

SEQ ID NO: 7605 - RNA, 21 nt, synthetic construct
  misc_feature 1..21: note = Synthetic
  source 1..21: mol_type = other RNA
ctgaggtgacacaatagcaat

SEQ ID NO: 7606 - RNA, 21 nt, synthetic construct
  misc_feature 1..21: note = Synthetic
  source 1..21: mol_type = other RNA
tgaggtgacacaatagcaatg

SEQ ID NO: 7607 - RNA, 21 nt, synthetic construct
  misc_feature 1..21: note = Synthetic
  source 1..21: mol_type = other RNA
gaggtgacacaatagcaatgg

SEQ ID NO: 7608 - RNA, 21 nt, synthetic construct
  misc_feature 1..21: note = Synthetic
  source 1..21: mol_type = other RNA
aggtgacacaatagcaatggg

SEQ ID NO: 7609 - RNA, 21 nt, synthetic construct
  misc_feature 1..21: note = Synthetic
  source 1..21: mol_type = other RNA
ggtgacacaatagcaatgggg

SEQ ID NO: 7610 - RNA, 21 nt, synthetic construct
  misc_feature 1..21: note = Synthetic
  source 1..21: mol_type = other RNA
gtgacacaatagcaatggggg

SEQ ID NO: 7611 - RNA, 21 nt, synthetic construct
  misc_feature 1..21: note = Synthetic
  source 1..21: mol_type = other RNA
tgacacaatagcaatgggggg

SEQ ID NO: 7612 - RNA, 21 nt, synthetic construct
  misc_feature 1..21: note = Synthetic
  source 1..21: mol_type = other RNA
gacacaatagcaatggggggc

SEQ ID NO: 7613 - RNA, 21 nt, synthetic construct
  misc_feature 1..21: note = Synthetic
  source 1..21: mol_type = other RNA
acacaatagcaatggggggcc

SEQ ID NO: 7614 - RNA, 21 nt, synthetic construct
  misc_feature 1..21: note = Synthetic
  source 1..21: mol_type = other RNA
cacaatagcaatggggggccg

SEQ ID NO: 7615 - RNA, 21 nt, synthetic construct
  misc_feature 1..21: note = Synthetic
  source 1..21: mol_type = other RNA
acaatagcaatggggggccga

SEQ ID NO: 7616 - RNA, 21 nt, synthetic construct
  misc_feature 1..21: note = Synthetic
  source 1..21: mol_type = other RNA
caatagcaatggggggccgat

SEQ ID NO: 7617 - RNA, 21 nt, synthetic construct
  misc_feature 1..21: note = Synthetic
  source 1..21: mol_type = other RNA
aatagcaatggggggccgatt

SEQ ID NO: 7618 - RNA, 21 nt, synthetic construct
  misc_feature 1..21: note = Synthetic
  source 1..21: mol_type = other RNA
atagcaatggggggccgattc

SEQ ID NO: 7619 - RNA, 21 nt, synthetic construct
  misc_feature 1..21: note = Synthetic
  source 1..21: mol_type = other RNA
tagcaatggggggccgattct

SEQ ID NO: 7620 - RNA, 21 nt, synthetic construct
  misc_feature 1..21: note = Synthetic
  source 1..21: mol_type = other RNA
agcaatggggggccgattctt

SEQ ID NO: 7621 - RNA, 21 nt, synthetic construct
  misc_feature 1..21: note = Synthetic
  source 1..21: mol_type = other RNA
gcaatggggggccgattctta

SEQ ID NO: 7622 - RNA, 21 nt, synthetic construct
  misc_feature 1..21: note = Synthetic
  source 1..21: mol_type = other RNA
caatggggggccgattcttac

SEQ ID NO: 7623 - RNA, 21 nt, synthetic construct
  misc_feature 1..21: note = Synthetic
  source 1..21: mol_type = other RNA
aatggggggccgattcttacg

SEQ ID NO: 7624 - RNA, 21 nt, synthetic construct
  misc_feature 1..21: note = Synthetic
  source 1..21: mol_type = other RNA
atggggggccgattcttacgg

SEQ ID NO: 7625 - RNA, 21 nt, synthetic construct
  misc_feature 1..21: note = Synthetic
  source 1..21: mol_type = other RNA
tggggggccgattcttacggg

SEQ ID NO: 7626 - RNA, 21 nt, synthetic construct
  misc_feature 1..21: note = Synthetic
  source 1..21: mol_type = other RNA
ggggggccgattcttacgggg

SEQ ID NO: 7627 - RNA, 21 nt, synthetic construct
  misc_feature 1..21: note = Synthetic
  source 1..21: mol_type = other RNA
gggggccgattcttacggggc

SEQ ID NO: 7628 - RNA, 21 nt, synthetic construct
  misc_feature 1..21: note = Synthetic
  source 1..21: mol_type = other RNA
ggggccgattcttacggggct

SEQ ID NO: 7629 - RNA, 21 nt, synthetic construct
  misc_feature 1..21: note = Synthetic
  source 1..21: mol_type = other RNA
gggccgattcttacggggctc

SEQ ID NO: 7630 - RNA, 21 nt, synthetic construct
  misc_feature 1..21: note = Synthetic
  source 1..21: mol_type = other RNA
ggccgattcttacggggctct

SEQ ID NO: 7631 - RNA, 21 nt, synthetic construct
  misc_feature 1..21: note = Synthetic
  source 1..21: mol_type = other RNA
gccgattcttacggggctctg

SEQ ID NO: 7632 - RNA, 21 nt, synthetic construct
  misc_feature 1..21: note = Synthetic
  source 1..21: mol_type = other RNA
ccgattcttacggggctctgg

SEQ ID NO: 7633 - RNA, 21 nt, synthetic construct
  misc_feature 1..21: note = Synthetic
  source 1..21: mol_type = other RNA
cgattcttacggggctctggc

SEQ ID NO: 7634 - RNA, 21 nt, synthetic construct
  misc_feature 1..21: note = Synthetic
  source 1..21: mol_type = other RNA
gattcttacggggctctggct

SEQ ID NO: 7635 - RNA, 21 nt, synthetic construct
  misc_feature 1..21: note = Synthetic
  source 1..21: mol_type = other RNA
attcttacggggctctggctt

SEQ ID NO: 7636 - RNA, 21 nt, synthetic construct
  misc_feature 1..21: note = Synthetic
  source 1..21: mol_type = other RNA
ttcttacggggctctggcttg

SEQ ID NO: 7637 - RNA, 21 nt, synthetic construct
  misc_feature 1..21: note = Synthetic
  source 1..21: mol_type = other RNA
tcttacggggctctggcttga

SEQ ID NO: 7638 - RNA, 21 nt, synthetic construct
  misc_feature 1..21: note = Synthetic
  source 1..21: mol_type = other RNA
cttacggggctctggcttgac

SEQ ID NO: 7639 - RNA, 21 nt, synthetic construct
  misc_feature 1..21: note = Synthetic
  source 1..21: mol_type = other RNA
ttacggggctctggcttgact

SEQ ID NO: 7640 - RNA, 21 nt, synthetic construct
  misc_feature 1..21: note = Synthetic
  source 1..21: mol_type = other RNA
tacggggctctggcttgactg

SEQ ID NO: 7641 - RNA, 21 nt, synthetic construct
  misc_feature 1..21: note = Synthetic
  source 1..21: mol_type = other RNA
acggggctctggcttgactgt

SEQ ID NO: 7642 - RNA, 21 nt, synthetic construct
  misc_feature 1..21: note = Synthetic
  source 1..21: mol_type = other RNA
cggggctctggcttgactgtc

SEQ ID NO: 7643 - RNA, 21 nt, synthetic construct
  misc_feature 1..21: note = Synthetic
  source 1..21: mol_type = other RNA
ggggctctggcttgactgtca

SEQ ID NO: 7644 - RNA, 21 nt, synthetic construct
  misc_feature 1..21: note = Synthetic
  source 1..21: mol_type = other RNA
gggctctggcttgactgtcac

SEQ ID NO: 7645 - RNA, 21 nt, synthetic construct
  misc_feature 1..21: note = Synthetic
  source 1..21: mol_type = other RNA
ggctctggcttgactgtcacg

SEQ ID NO: 7646 - RNA, 21 nt, synthetic construct
  misc_feature 1..21: note = Synthetic
  source 1..21: mol_type = other RNA
gctctggcttgactgtcacgt

SEQ ID NO: 7647 - RNA, 21 nt, synthetic construct
  misc_feature 1..21: note = Synthetic
  source 1..21: mol_type = other RNA
ctctggcttgactgtcacgtt

SEQ ID NO: 7648 - RNA, 21 nt, synthetic construct
  misc_feature 1..21: note = Synthetic
  source 1..21: mol_type = other RNA
tctggcttgactgtcacgttc

SEQ ID NO: 7649 - RNA, 21 nt, synthetic construct
  misc_feature 1..21: note = Synthetic
  source 1..21: mol_type = other RNA
ctggcttgactgtcacgttca

SEQ ID NO: 7650 - RNA, 21 nt, synthetic construct
  misc_feature 1..21: note = Synthetic
  source 1..21: mol_type = other RNA
tggcttgactgtcacgttcac

SEQ ID NO: 7651 - RNA, 21 nt, synthetic construct
  misc_feature 1..21: note = Synthetic
  source 1..21: mol_type = other RNA
ggcttgactgtcacgttcaca

SEQ ID NO: 7652 - RNA, 21 nt, synthetic construct
  misc_feature 1..21: note = Synthetic
  source 1..21: mol_type = other RNA
gcttgactgtcacgttcacat

SEQ ID NO: 7653 - RNA, 21 nt, synthetic construct
  misc_feature 1..21: note = Synthetic
  source 1..21: mol_type = other RNA
cttgactgtcacgttcacata

SEQ ID NO: 7654 - RNA, 21 nt, synthetic construct
  misc_feature 1..21: note = Synthetic
  source 1..21: mol_type = other RNA
ttgactgtcacgttcacatag

SEQ ID NO: 7655 - RNA, 21 nt, synthetic construct
  misc_feature 1..21: note = Synthetic
  source 1..21: mol_type = other RNA
tgactgtcacgttcacatagc

SEQ ID NO: 7656 - RNA, 21 nt, synthetic construct
  misc_feature 1..21: note = Synthetic
  source 1..21: mol_type = other RNA
gactgtcacgttcacatagcc

SEQ ID NO: 7657 - RNA, 21 nt, synthetic construct
  misc_feature 1..21: note = Synthetic
  source 1..21: mol_type = other RNA
actgtcacgttcacatagcct

SEQ ID NO: 7658 - RNA, 21 nt, synthetic construct
  misc_feature 1..21: note = Synthetic
  source 1..21: mol_type = other RNA
ctgtcacgttcacatagcctt

SEQ ID NO: 7659 - RNA, 21 nt, synthetic construct
  misc_feature 1..21: note = Synthetic
  source 1..21: mol_type = other RNA
tgtcacgttcacatagccttc

SEQ ID NO: 7660 - RNA, 21 nt, synthetic construct
  misc_feature 1..21: note = Synthetic
  source 1..21: mol_type = other RNA
gtcacgttcacatagccttcc

SEQ ID NO: 7661 - RNA, 21 nt, synthetic construct
  misc_feature 1..21: note = Synthetic
  source 1..21: mol_type = other RNA
tcacgttcacatagccttccc

SEQ ID NO: 7662 - RNA, 21 nt, synthetic construct
  misc_feature 1..21: note = Synthetic
  source 1..21: mol_type = other RNA
cacgttcacatagccttcccc

SEQ ID NO: 7663 - RNA, 21 nt, synthetic construct
  misc_feature 1..21: note = Synthetic
  source 1..21: mol_type = other RNA
acgttcacatagccttcccca

SEQ ID NO: 7664 - RNA, 21 nt, synthetic construct
  misc_feature 1..21: note = Synthetic
  source 1..21: mol_type = other RNA
cgttcacatagccttccccat

SEQ ID NO: 7665 - RNA, 21 nt, synthetic construct
  misc_feature 1..21: note = Synthetic
  source 1..21: mol_type = other RNA
gttcacatagccttccccatg

SEQ ID NO: 7666 - RNA, 21 nt, synthetic construct
  misc_feature 1..21: note = Synthetic
  source 1..21: mol_type = other RNA
ttcacatagccttccccatgg

SEQ ID NO: 7667 - RNA, 21 nt, synthetic construct
  misc_feature 1..21: note = Synthetic
  source 1..21: mol_type = other RNA
tcacatagccttccccatggg

SEQ ID NO: 7668 - RNA, 21 nt, synthetic construct
  misc_feature 1..21: note = Synthetic
  source 1..21: mol_type = other RNA
cacatagccttccccatgggc

SEQ ID NO: 7669 - RNA, 21 nt, synthetic construct
  misc_feature 1..21: note = Synthetic
  source 1..21: mol_type = other RNA
acatagccttccccatgggca

SEQ ID NO: 7670 - RNA, 21 nt, synthetic construct
  misc_feature 1..21: note = Synthetic
  source 1..21: mol_type = other RNA
catagccttccccatgggcat

SEQ ID NO: 7671 - RNA, 21 nt, synthetic construct
  misc_feature 1..21: note = Synthetic
  source 1..21: mol_type = other RNA
atagccttccccatgggcatt

SEQ ID NO: 7672 - RNA, 21 nt, synthetic construct
  misc_feature 1..21: note = Synthetic
  source 1..21: mol_type = other RNA
tagccttccccatgggcattt

SEQ ID NO: 7673 - RNA, 21 nt, synthetic construct
  misc_feature 1..21: note = Synthetic
  source 1..21: mol_type = other RNA
agccttccccatgggcatttt

SEQ ID NO: 7674 - RNA, 21 nt, synthetic construct
  misc_feature 1..21: note = Synthetic
  source 1..21: mol_type = other RNA
gccttccccatgggcattttg

SEQ ID NO: 7675 - RNA, 21 nt, synthetic construct
  misc_feature 1..21: note = Synthetic
  source 1..21: mol_type = other RNA
ccttccccatgggcattttga

SEQ ID NO: 7676 - RNA, 21 nt, synthetic construct
  misc_feature 1..21: note = Synthetic
  source 1..21: mol_type = other RNA
cttccccatgggcattttgac

SEQ ID NO: 7677 - RNA, 21 nt, synthetic construct
  misc_feature 1..21: note = Synthetic
  source 1..21: mol_type = other RNA
ttccccatgggcattttgacc

SEQ ID NO: 7678 - RNA, 21 nt, synthetic construct
  misc_feature 1..21: note = Synthetic
  source 1..21: mol_type = other RNA
tccccatgggcattttgaccc

SEQ ID NO: 7679 - RNA, 21 nt, synthetic construct
  misc_feature 1..21: note = Synthetic
  source 1..21: mol_type = other RNA
ccccatgggcattttgaccct

SEQ ID NO: 7680 - RNA, 21 nt, synthetic construct
  misc_feature 1..21: note = Synthetic
  source 1..21: mol_type = other RNA
cccatgggcattttgaccctc

SEQ ID NO: 7681 - RNA, 21 nt, synthetic construct
  misc_feature 1..21: note = Synthetic
  source 1..21: mol_type = other RNA
ccatgggcattttgaccctct

SEQ ID NO: 7682 - RNA, 21 nt, synthetic construct
  misc_feature 1..21: note = Synthetic
  source 1..21: mol_type = other RNA
catgggcattttgaccctcta

SEQ ID NO: 7683 - RNA, 21 nt, synthetic construct
  misc_feature 1..21: note = Synthetic
  source 1..21: mol_type = other RNA
atgggcattttgaccctctac

SEQ ID NO: 7684 - RNA, 21 nt, synthetic construct
  misc_feature 1..21: note = Synthetic
  source 1..21: mol_type = other RNA
tgggcattttgaccctctaca

SEQ ID NO: 7685 - RNA, 21 nt, synthetic construct
  misc_feature 1..21: note = Synthetic
  source 1..21: mol_type = other RNA
gggcattttgaccctctacaa

SEQ ID NO: 7686 - RNA, 21 nt, synthetic construct
  misc_feature 1..21: note = Synthetic
  source 1..21: mol_type = other RNA
ggcattttgaccctctacaat

SEQ ID NO: 7687 - RNA, 21 nt, synthetic construct
  misc_feature 1..21: note = Synthetic
  source 1..21: mol_type = other RNA
gcattttgaccctctacaatc

SEQ ID NO: 7688 - RNA, 21 nt, synthetic construct
  misc_feature 1..21: note = Synthetic
  source 1..21: mol_type = other RNA
cattttgaccctctacaatca

SEQ ID NO: 7689 - RNA, 21 nt, synthetic construct
  misc_feature 1..21: note = Synthetic
  source 1..21: mol_type = other RNA
attttgaccctctacaatcac

SEQ ID NO: 7690 - RNA, 21 nt, synthetic construct
  misc_feature 1..21: note = Synthetic
  source 1..21: mol_type = other RNA
ttttgaccctctacaatcact

SEQ ID NO: 7691 - RNA, 21 nt, synthetic construct
  misc_feature 1..21: note = Synthetic
  source 1..21: mol_type = other RNA
tttgaccctctacaatcactt

SEQ ID NO: 7692 - RNA, 21 nt, synthetic construct
  misc_feature 1..21: note = Synthetic
  source 1..21: mol_type = other RNA
ttgaccctctacaatcacttt

SEQ ID NO: 7693 - RNA, 21 nt, synthetic construct
  misc_feature 1..21: note = Synthetic
  source 1..21: mol_type = other RNA
tgaccctctacaatcactttg

SEQ ID NO: 7694 - RNA, 21 nt, synthetic construct
  misc_feature 1..21: note = Synthetic
  source 1..21: mol_type = other RNA
gaccctctacaatcactttga

SEQ ID NO: 7695 - RNA, 21 nt, synthetic construct
  misc_feature 1..21: note = Synthetic
  source 1..21: mol_type = other RNA
accctctacaatcactttgaa

SEQ ID NO: 7696 - RNA, 21 nt, synthetic construct
  misc_feature 1..21: note = Synthetic
  source 1..21: mol_type = other RNA
ccctctacaatcactttgaat

SEQ ID NO: 7697 - RNA, 21 nt, synthetic construct
  misc_feature 1..21: note = Synthetic
  source 1..21: mol_type = other RNA
cctctacaatcactttgaatt

SEQ ID NO: 7698 - RNA, 21 nt, synthetic construct
  misc_feature 1..21: note = Synthetic
  source 1..21: mol_type = other RNA
ctctacaatcactttgaattc

SEQ ID NO: 7699 - RNA, 21 nt, synthetic construct
  misc_feature 1..21: note = Synthetic
  source 1..21: mol_type = other RNA
tctacaatcactttgaattca

SEQ ID NO: 7700 - RNA, 21 nt, synthetic construct
  misc_feature 1..21: note = Synthetic
  source 1..21: mol_type = other RNA
ctacaatcactttgaattcat

SEQ ID NO: 7701 - RNA, 21 nt, synthetic construct
  misc_feature 1..21: note = Synthetic
  source 1..21: mol_type = other RNA
tacaatcactttgaattcata

SEQ ID NO: 7702 - RNA, 21 nt, synthetic construct
  misc_feature 1..21: note = Synthetic
  source 1..21: mol_type = other RNA
acaatcactttgaattcatac

SEQ ID NO: 7703 - RNA, 21 nt, synthetic construct
  misc_feature 1..21: note = Synthetic
  source 1..21: mol_type = other RNA
caatcactttgaattcataca

SEQ ID NO: 7704 - RNA, 21 nt, synthetic construct
  misc_feature 1..21: note = Synthetic
  source 1..21: mol_type = other RNA
aatcactttgaattcatacag

SEQ ID NO: 7705 - RNA, 21 nt, synthetic construct
  misc_feature 1..21: note = Synthetic
  source 1..21: mol_type = other RNA
atcactttgaattcatacagg

SEQ ID NO: 7706 - RNA, 21 nt, synthetic construct
  misc_feature 1..21: note = Synthetic
  source 1..21: mol_type = other RNA
tcactttgaattcatacaggc

SEQ ID NO: 7707 - RNA, 21 nt, synthetic construct
  misc_feature 1..21: note = Synthetic
  source 1..21: mol_type = other RNA
cactttgaattcatacaggcc

SEQ ID NO: 7708 - RNA, 21 nt, synthetic construct
  misc_feature 1..21: note = Synthetic
  source 1..21: mol_type = other RNA
actttgaattcatacaggcct

SEQ ID NO: 7709 - RNA, 21 nt, synthetic construct
  misc_feature 1..21: note = Synthetic
  source 1..21: mol_type = other RNA
ctttgaattcatacaggcctg

SEQ ID NO: 7710 - RNA, 21 nt, synthetic construct
  misc_feature 1..21: note = Synthetic
  source 1..21: mol_type = other RNA
tttgaattcatacaggcctgg

SEQ ID NO: 7711 - RNA, 21 nt, synthetic construct
  misc_feature 1..21: note = Synthetic
  source 1..21: mol_type = other RNA
ttgaattcatacaggcctgga

SEQ ID NO: 7712 - RNA, 21 nt, synthetic construct
  misc_feature 1..21: note = Synthetic
  source 1..21: mol_type = other RNA
tgaattcatacaggcctggag

SEQ ID NO: 7713 - RNA, 21 nt, synthetic construct
  misc_feature 1..21: note = Synthetic
  source 1..21: mol_type = other RNA
gaattcatacaggcctggagt

SEQ ID NO: 7714 - RNA, 21 nt, synthetic construct
  misc_feature 1..21: note = Synthetic
  source 1..21: mol_type = other RNA
aattcatacaggcctggagtg

SEQ ID NO: 7715 - RNA, 21 nt, synthetic construct
  misc_feature 1..21: note = Synthetic
  source 1..21: mol_type = other RNA
attcatacaggcctggagtga

SEQ ID NO: 7716 - RNA, 21 nt, synthetic construct
  misc_feature 1..21: note = Synthetic
  source 1..21: mol_type = other RNA
ttcatacaggcctggagtgag

SEQ ID NO: 7717 - RNA, 21 nt, synthetic construct
  misc_feature 1..21: note = Synthetic
  source 1..21: mol_type = other RNA
tcatacaggcctggagtgagc

SEQ ID NO: 7718 - RNA, 21 nt, synthetic construct
  misc_feature 1..21: note = Synthetic
  source 1..21: mol_type = other RNA
catacaggcctggagtgagct

SEQ ID NO: 7719 - RNA, 21 nt, synthetic construct
  misc_feature 1..21: note = Synthetic
  source 1..21: mol_type = other RNA
atacaggcctggagtgagctt

SEQ ID NO: 7720 - RNA, 21 nt, synthetic construct
  misc_feature 1..21: note = Synthetic
  source 1..21: mol_type = other RNA
tacaggcctggagtgagcttc

SEQ ID NO: 7721 - RNA, 21 nt, synthetic construct
  misc_feature 1..21: note = Synthetic
  source 1..21: mol_type = other RNA
acaggcctggagtgagcttcg

SEQ ID NO: 7722 - RNA, 21 nt, synthetic construct
  misc_feature 1..21: note = Synthetic
  source 1..21: mol_type = other RNA
caggcctggagtgagcttcga

SEQ ID NO: 7723 - RNA, 21 nt, synthetic construct
  misc_feature 1..21: note = Synthetic
  source 1..21: mol_type = other RNA
aggcctggagtgagcttcgat

SEQ ID NO: 7724 - RNA, 21 nt, synthetic construct
  misc_feature 1..21: note = Synthetic
  source 1..21: mol_type = other RNA
ggcctggagtgagcttcgata

SEQ ID NO: 7725 - RNA, 21 nt, synthetic construct
  misc_feature 1..21: note = Synthetic
  source 1..21: mol_type = other RNA
gcctggagtgagcttcgatag

SEQ ID NO: 7726 - RNA, 21 nt, synthetic construct
  misc_feature 1..21: note = Synthetic
  source 1..21: mol_type = other RNA
cctggagtgagcttcgatagt

SEQ ID NO: 7727 - RNA, 21 nt, synthetic construct
  misc_feature 1..21: note = Synthetic
  source 1..21: mol_type = other RNA
ctggagtgagcttcgatagtt

SEQ ID NO: 7728 - RNA, 21 nt, synthetic construct
  misc_feature 1..21: note = Synthetic
  source 1..21: mol_type = other RNA
tggagtgagcttcgatagttt

SEQ ID NO: 7729 - RNA, 21 nt, synthetic construct
  misc_feature 1..21: note = Synthetic
  source 1..21: mol_type = other RNA
ggagtgagcttcgatagtttg

SEQ ID NO: 7730 - RNA, 21 nt, synthetic construct
  misc_feature 1..21: note = Synthetic
  source 1..21: mol_type = other RNA
gagtgagcttcgatagtttga

SEQ ID NO: 7731 - RNA, 21 nt, synthetic construct
  misc_feature 1..21: note = Synthetic
  source 1..21: mol_type = other RNA
agtgagcttcgatagtttgag

SEQ ID NO: 7732 - RNA, 21 nt, synthetic construct
  misc_feature 1..21: note = Synthetic
  source 1..21: mol_type = other RNA
gtgagcttcgatagtttgagg

SEQ ID NO: 7733 - RNA, 21 nt, synthetic construct
  misc_feature 1..21: note = Synthetic
  source 1..21: mol_type = other RNA
tgagcttcgatagtttgagga

SEQ ID NO: 7734 - RNA, 21 nt, synthetic construct
  misc_feature 1..21: note = Synthetic
  source 1..21: mol_type = other RNA
gagcttcgatagtttgaggat

SEQ ID NO: 7735 - RNA, 21 nt, synthetic construct
  misc_feature 1..21: note = Synthetic
  source 1..21: mol_type = other RNA
agcttcgatagtttgaggatc

SEQ ID NO: 7736 - RNA, 21 nt, synthetic construct
  misc_feature 1..21: note = Synthetic
  source 1..21: mol_type = other RNA
gcttcgatagtttgaggatct

SEQ ID NO: 7737 - RNA, 21 nt, synthetic construct
  misc_feature 1..21: note = Synthetic
  source 1..21: mol_type = other RNA
cttcgatagtttgaggatctg

SEQ ID NO: 7738 - RNA, 21 nt, synthetic construct
  misc_feature 1..21: note = Synthetic
  source 1..21: mol_type = other RNA
ttcgatagtttgaggatctgg

SEQ ID NO: 7739 - RNA, 21 nt, synthetic construct
  misc_feature 1..21: note = Synthetic
  source 1..21: mol_type = other RNA
tcgatagtttgaggatctggg

SEQ ID NO: 7740 - RNA, 21 nt, synthetic construct
  misc_feature 1..21: note = Synthetic
  source 1..21: mol_type = other RNA
cgatagtttgaggatctggga

SEQ ID NO: 7741 - RNA, 21 nt, synthetic construct
  misc_feature 1..21: note = Synthetic
  source 1..21: mol_type = other RNA
gatagtttgaggatctgggaa

SEQ ID NO: 7742 - RNA, 21 nt, synthetic construct
  misc_feature 1..21: note = Synthetic
  source 1..21: mol_type = other RNA
atagtttgaggatctgggaat

SEQ ID NO: 7743 - RNA, 21 nt, synthetic construct
  misc_feature 1..21: note = Synthetic
  source 1..21: mol_type = other RNA
tagtttgaggatctgggaatg

SEQ ID NO: 7744 - RNA, 21 nt, synthetic construct
  misc_feature 1..21: note = Synthetic
  source 1..21: mol_type = other RNA
agtttgaggatctgggaatgt

SEQ ID NO: 7745 - RNA, 21 nt, synthetic construct
  misc_feature 1..21: note = Synthetic
  source 1..21: mol_type = other RNA
gtttgaggatctgggaatgtt

SEQ ID NO: 7746 - RNA, 21 nt, synthetic construct
  misc_feature 1..21: note = Synthetic
  source 1..21: mol_type = other RNA
tttgaggatctgggaatgttt

SEQ ID NO: 7747 - RNA, 21 nt, synthetic construct
  misc_feature 1..21: note = Synthetic
  source 1..21: mol_type = other RNA
ttgaggatctgggaatgtttc

SEQ ID NO: 7748 - RNA, 21 nt, synthetic construct
  misc_feature 1..21: note = Synthetic
  source 1..21: mol_type = other RNA
tgaggatctgggaatgtttcc

SEQ ID NO: 7749 - RNA, 21 nt, synthetic construct
  misc_feature 1..21: note = Synthetic
  source 1..21: mol_type = other RNA
gaggatctgggaatgtttccc

SEQ ID NO: 7750 - RNA, 21 nt, synthetic construct
  misc_feature 1..21: note = Synthetic
  source 1..21: mol_type = other RNA
aggatctgggaatgtttccct

SEQ ID NO: 7751 - RNA, 21 nt, synthetic construct
  misc_feature 1..21: note = Synthetic
  source 1..21: mol_type = other RNA
ggatctgggaatgtttccctt

SEQ ID NO: 7752 - RNA, 21 nt, synthetic construct
  misc_feature 1..21: note = Synthetic
  source 1..21: mol_type = other RNA
gatctgggaatgtttcccttc

SEQ ID NO: 7753 - RNA, 21 nt, synthetic construct
  misc_feature 1..21: note = Synthetic
  source 1..21: mol_type = other RNA
atctgggaatgtttcccttcc

SEQ ID NO: 7754 - RNA, 21 nt, synthetic construct
  misc_feature 1..21: note = Synthetic
  source 1..21: mol_type = other RNA
tctgggaatgtttcccttcca

SEQ ID NO: 7755 - RNA, 21 nt, synthetic construct
  misc_feature 1..21: note = Synthetic
  source 1..21: mol_type = other RNA
ctgggaatgtttcccttccat

SEQ ID NO: 7756 - RNA, 21 nt, synthetic construct
  misc_feature 1..21: note = Synthetic
  source 1..21: mol_type = other RNA
tgggaatgtttcccttccatt

SEQ ID NO: 7757 - RNA, 21 nt, synthetic construct
  misc_feature 1..21: note = Synthetic
  source 1..21: mol_type = other RNA
gggaatgtttcccttccattt

SEQ ID NO: 7758 - RNA, 21 nt, synthetic construct
  misc_feature 1..21: note = Synthetic
  source 1..21: mol_type = other RNA
ggaatgtttcccttccatttc

SEQ ID NO: 7759 - RNA, 21 nt, synthetic construct
  misc_feature 1..21: note = Synthetic
  source 1..21: mol_type = other RNA
gaatgtttcccttccatttct

SEQ ID NO: 7760 - RNA, 21 nt, synthetic construct
  misc_feature 1..21: note = Synthetic
  source 1..21: mol_type = other RNA
aatgtttcccttccatttctc

SEQ ID NO: 7761 - RNA, 21 nt, synthetic construct
  misc_feature 1..21: note = Synthetic
  source 1..21: mol_type = other RNA
atgtttcccttccatttctcc

SEQ ID NO: 7762 - RNA, 21 nt, synthetic construct
  misc_feature 1..21: note = Synthetic
  source 1..21: mol_type = other RNA
tgtttcccttccatttctcca

SEQ ID NO: 7763 - RNA, 21 nt, synthetic construct
  misc_feature 1..21: note = Synthetic
  source 1..21: mol_type = other RNA
gtttcccttccatttctccac

SEQ ID NO: 7764 - RNA, 21 nt, synthetic construct
  misc_feature 1..21: note = Synthetic
  source 1..21: mol_type = other RNA
tttcccttccatttctccact

SEQ ID NO: 7765 - RNA, 21 nt, synthetic construct
  misc_feature 1..21: note = Synthetic
  source 1..21: mol_type = other RNA
ttcccttccatttctccactg

SEQ ID NO: 7766 - RNA, 21 nt, synthetic construct
  misc_feature 1..21: note = Synthetic
  source 1..21: mol_type = other RNA
tcccttccatttctccactgt

SEQ ID NO: 7767 - RNA, 21 nt, synthetic construct
  misc_feature 1..21: note = Synthetic
  source 1..21: mol_type = other RNA
cccttccatttctccactgta

SEQ ID NO: 7768 - RNA, 21 nt, synthetic construct
  misc_feature 1..21: note = Synthetic
  source 1..21: mol_type = other RNA
ccttccatttctccactgtag

SEQ ID NO: 7769 - RNA, 21 nt, synthetic construct
  misc_feature 1..21: note = Synthetic
  source 1..21: mol_type = other RNA
cttccatttctccactgtagt

SEQ ID NO: 7770 - RNA, 21 nt, synthetic construct
  misc_feature 1..21: note = Synthetic
  source 1..21: mol_type = other RNA
ttccatttctccactgtagtc

SEQ ID NO: 7771 - RNA, 21 nt, synthetic construct
  misc_feature 1..21: note = Synthetic
  source 1..21: mol_type = other RNA
tccatttctccactgtagtct

SEQ ID NO: 7772 - RNA, 21 nt, synthetic construct
  misc_feature 1..21: note = Synthetic
  source 1..21: mol_type = other RNA
ccatttctccactgtagtctc

SEQ ID NO: 7773 - RNA, 21 nt, synthetic construct
  misc_feature 1..21: note = Synthetic
  source 1..21: mol_type = other RNA
catttctccactgtagtctct

SEQ ID NO: 7774 - RNA, 21 nt, synthetic construct
  misc_feature 1..21: note = Synthetic
  source 1..21: mol_type = other RNA
atttctccactgtagtctcta

SEQ ID NO: 7775 - RNA, 21 nt, synthetic construct
  misc_feature 1..21: note = Synthetic
  source 1..21: mol_type = other RNA
tttctccactgtagtctctag

SEQ ID NO: 7776 - RNA, 21 nt, synthetic construct
  misc_feature 1..21: note = Synthetic
  source 1..21: mol_type = other RNA
ttctccactgtagtctctagg

SEQ ID NO: 7777 - RNA, 21 nt, synthetic construct
  misc_feature 1..21: note = Synthetic
  source 1..21: mol_type = other RNA
tctccactgtagtctctagga

SEQ ID NO: 7778 - RNA, 21 nt, synthetic construct
  misc_feature 1..21: note = Synthetic
  source 1..21: mol_type = other RNA
ctccactgtagtctctaggat

SEQ ID NO: 7779 - RNA, 21 nt, synthetic construct
  misc_feature 1..21: note = Synthetic
  source 1..21: mol_type = other RNA
tccactgtagtctctaggatg

SEQ ID NO: 7780 - RNA, 21 nt, synthetic construct
  misc_feature 1..21: note = Synthetic
  source 1..21: mol_type = other RNA
ccactgtagtctctaggatga

SEQ ID NO: 7781 - RNA, 21 nt, synthetic construct
  misc_feature 1..21: note = Synthetic
  source 1..21: mol_type = other RNA
cactgtagtctctaggatgag

SEQ ID NO: 7782 - RNA, 21 nt, synthetic construct
  misc_feature 1..21: note = Synthetic
  source 1..21: mol_type = other RNA
actgtagtctctaggatgagt

SEQ ID NO: 7783 - RNA, 21 nt, synthetic construct
  misc_feature 1..21: note = Synthetic
  source 1..21: mol_type = other RNA
ctgtagtctctaggatgagta

SEQ ID NO: 7784 - RNA, 21 nt, synthetic construct
  misc_feature 1..21: note = Synthetic
  source 1..21: mol_type = other RNA
tgtagtctctaggatgagtaa

SEQ ID NO: 7785 - RNA, 21 nt, synthetic construct
  misc_feature 1..21: note = Synthetic
  source 1..21: mol_type = other RNA
gtagtctctaggatgagtaat

SEQ ID NO: 7786 - RNA, 21 nt, synthetic construct
  misc_feature 1..21: note = Synthetic
  source 1..21: mol_type = other RNA
tagtctctaggatgagtaatc

SEQ ID NO: 7787 - RNA, 21 nt, synthetic construct
  misc_feature 1..21: note = Synthetic
  source 1..21: mol_type = other RNA
agtctctaggatgagtaatca

SEQ ID NO: 7788 - RNA, 21 nt, synthetic construct
  misc_feature 1..21: note = Synthetic
  source 1..21: mol_type = other RNA
gtctctaggatgagtaatcag

SEQ ID NO: 7789 - RNA, 21 nt, synthetic construct
  misc_feature 1..21: note = Synthetic
  source 1..21: mol_type = other RNA
tctctaggatgagtaatcagc

SEQ ID NO: 7790 - RNA, 21 nt, synthetic construct
  misc_feature 1..21: note = Synthetic
  source 1..21: mol_type = other RNA
ctctaggatgagtaatcagct

SEQ ID NO: 7791 - RNA, 21 nt, synthetic construct
  misc_feature 1..21: note = Synthetic
  source 1..21: mol_type = other RNA
tctaggatgagtaatcagctg

SEQ ID NO: 7792 - RNA, 21 nt, synthetic construct
  misc_feature 1..21: note = Synthetic
  source 1..21: mol_type = other RNA
ctaggatgagtaatcagctgc

SEQ ID NO: 7793 - RNA, 21 nt, synthetic construct
  misc_feature 1..21: note = Synthetic
  source 1..21: mol_type = other RNA
taggatgagtaatcagctgcc

SEQ ID NO: 7794 - RNA, 21 nt, synthetic construct
  misc_feature 1..21: note = Synthetic
  source 1..21: mol_type = other RNA
aggatgagtaatcagctgcca

SEQ ID NO: 7795 - RNA, 21 nt, synthetic construct
  misc_feature 1..21: note = Synthetic
  source 1..21: mol_type = other RNA
ggatgagtaatcagctgccag

SEQ ID NO: 7796 - RNA, 21 nt, synthetic construct
  misc_feature 1..21: note = Synthetic
  source 1..21: mol_type = other RNA
gatgagtaatcagctgccagt

SEQ ID NO: 7797 - RNA, 21 nt, synthetic construct
  misc_feature 1..21: note = Synthetic
  source 1..21: mol_type = other RNA
atgagtaatcagctgccagtc

SEQ ID NO: 7798 - RNA, 21 nt, synthetic construct
  misc_feature 1..21: note = Synthetic
  source 1..21: mol_type = other RNA
tgagtaatcagctgccagtcg

SEQ ID NO: 7799 - RNA, 21 nt, synthetic construct
  misc_feature 1..21: note = Synthetic
  source 1..21: mol_type = other RNA
gagtaatcagctgccagtcgt

SEQ ID NO: 7800 - RNA, 21 nt, synthetic construct
  misc_feature 1..21: note = Synthetic
  source 1..21: mol_type = other RNA
agtaatcagctgccagtcgta

SEQ ID NO: 7801 - RNA, 21 nt, synthetic construct
  misc_feature 1..21: note = Synthetic
  source 1..21: mol_type = other RNA
gtaatcagctgccagtcgtag

SEQ ID NO: 7802 - RNA, 21 nt, synthetic construct
  misc_feature 1..21: note = Synthetic
  source 1..21: mol_type = other RNA
taatcagctgccagtcgtagg

SEQ ID NO: 7803 - RNA, 21 nt, synthetic construct
  misc_feature 1..21: note = Synthetic
  source 1..21: mol_type = other RNA
aatcagctgccagtcgtaggt

SEQ ID NO: 7804 - RNA, 21 nt, synthetic construct
  misc_feature 1..21: note = Synthetic
  source 1..21: mol_type = other RNA
atcagctgccagtcgtaggtg

SEQ ID NO: 7805 - RNA, 21 nt, synthetic construct
  misc_feature 1..21: note = Synthetic
  source 1..21: mol_type = other RNA
tcagctgccagtcgtaggtgt

SEQ ID NO: 7806 - RNA, 21 nt, synthetic construct
  misc_feature 1..21: note = Synthetic
  source 1..21: mol_type = other RNA
cagctgccagtcgtaggtgta

SEQ ID NO: 7807 - RNA, 21 nt, synthetic construct
  misc_feature 1..21: note = Synthetic
  source 1..21: mol_type = other RNA
agctgccagtcgtaggtgtag

SEQ ID NO: 7808 - RNA, 21 nt, synthetic construct
  misc_feature 1..21: note = Synthetic
  source 1..21: mol_type = other RNA
gctgccagtcgtaggtgtagg

SEQ ID NO: 7809 - RNA, 21 nt, synthetic construct
  misc_feature 1..21: note = Synthetic
  source 1..21: mol_type = other RNA
ctgccagtcgtaggtgtaggt

SEQ ID NO: 7810 - RNA, 21 nt, synthetic construct
  misc_feature 1..21: note = Synthetic
  source 1..21: mol_type = other RNA
tgccagtcgtaggtgtaggtt

SEQ ID NO: 7811 - RNA, 21 nt, synthetic construct
  misc_feature 1..21: note = Synthetic
  source 1..21: mol_type = other RNA
gccagtcgtaggtgtaggttt

SEQ ID NO: 7812 - RNA, 21 nt, synthetic construct
  misc_feature 1..21: note = Synthetic
  source 1..21: mol_type = other RNA
ccagtcgtaggtgtaggtttc

SEQ ID NO: 7813 - RNA, 21 nt, synthetic construct
  misc_feature 1..21: note = Synthetic
  source 1..21: mol_type = other RNA
cagtcgtaggtgtaggtttct

SEQ ID NO: 7814 - RNA, 21 nt, synthetic construct
  misc_feature 1..21: note = Synthetic
  source 1..21: mol_type = other RNA
agtcgtaggtgtaggtttctc

SEQ ID NO: 7815 - RNA, 21 nt, synthetic construct
  misc_feature 1..21: note = Synthetic
  source 1..21: mol_type = other RNA
gtcgtaggtgtaggtttctcc

SEQ ID NO: 7816 - RNA, 21 nt, synthetic construct
  misc_feature 1..21: note = Synthetic
  source 1..21: mol_type = other RNA
tcgtaggtgtaggtttctcct

SEQ ID NO: 7817 - RNA, 21 nt, synthetic construct
  misc_feature 1..21: note = Synthetic
  source 1..21: mol_type = other RNA
cgtaggtgtaggtttctcctt

SEQ ID NO: 7818 - RNA, 21 nt, synthetic construct
  misc_feature 1..21: note = Synthetic
  source 1..21: mol_type = other RNA
gtaggtgtaggtttctccttt

SEQ ID NO: 7819 - RNA, 21 nt, synthetic construct
  misc_feature 1..21: note = Synthetic
  source 1..21: mol_type = other RNA
taggtgtaggtttctccttta

SEQ ID NO: 7820 - RNA, 21 nt, synthetic construct
  misc_feature 1..21: note = Synthetic
  source 1..21: mol_type = other RNA
aggtgtaggtttctcctttag

SEQ ID NO: 7821 - RNA, 21 nt, synthetic construct
  misc_feature 1..21: note = Synthetic
  source 1..21: mol_type = other RNA
ggtgtaggtttctcctttagg

SEQ ID NO: 7822 - RNA, 21 nt, synthetic construct
  misc_feature 1..21: note = Synthetic
  source 1..21: mol_type = other RNA
gtgtaggtttctcctttaggt

SEQ ID NO: 7823 - RNA, 21 nt, synthetic construct
  misc_feature 1..21: note = Synthetic
  source 1..21: mol_type = other RNA
tgtaggtttctcctttaggtg

SEQ ID NO: 7824 - RNA, 21 nt, synthetic construct
  misc_feature 1..21: note = Synthetic
  source 1..21: mol_type = other RNA
gtaggtttctcctttaggtgg

SEQ ID NO: 7825 - RNA, 21 nt, synthetic construct
  misc_feature 1..21: note = Synthetic
  source 1..21: mol_type = other RNA
taggtttctcctttaggtggt

SEQ ID NO: 7826 - RNA, 21 nt, synthetic construct
  misc_feature 1..21: note = Synthetic
  source 1..21: mol_type = other RNA
aggtttctcctttaggtggtt

SEQ ID NO: 7827 - RNA, 21 nt, synthetic construct
  misc_feature 1..21: note = Synthetic
  source 1..21: mol_type = other RNA
ggtttctcctttaggtggttc

SEQ ID NO: 7828 - RNA, 21 nt, synthetic construct
  misc_feature 1..21: note = Synthetic
  source 1..21: mol_type = other RNA
gtttctcctttaggtggttct

SEQ ID NO: 7829 - RNA, 21 nt, synthetic construct
  misc_feature 1..21: note = Synthetic
  source 1..21: mol_type = other RNA
tttctcctttaggtggttctt

SEQ ID NO: 7830 - RNA, 21 nt, synthetic construct
  misc_feature 1..21: note = Synthetic
  source 1..21: mol_type = other RNA
ttctcctttaggtggttcttg

SEQ ID NO: 7831 - RNA, 21 nt, synthetic construct
  misc_feature 1..21: note = Synthetic
  source 1..21: mol_type = other RNA
tctcctttaggtggttcttgg

SEQ ID NO: 7832 - RNA, 21 nt, synthetic construct
  misc_feature 1..21: note = Synthetic
  source 1..21: mol_type = other RNA
ctcctttaggtggttcttgga

SEQ ID NO: 7833 - RNA, 21 nt, synthetic construct
  misc_feature 1..21: note = Synthetic
  source 1..21: mol_type = other RNA
tcctttaggtggttcttggag

SEQ ID NO: 7834 - RNA, 21 nt, synthetic construct
  misc_feature 1..21: note = Synthetic
  source 1..21: mol_type = other RNA
cctttaggtggttcttggaga

SEQ ID NO: 7835 - RNA, 21 nt, synthetic construct
  misc_feature 1..21: note = Synthetic
  source 1..21: mol_type = other RNA
ctttaggtggttcttggagaa

SEQ ID NO: 7836 - RNA, 21 nt, synthetic construct
  misc_feature 1..21: note = Synthetic
  source 1..21: mol_type = other RNA
tttaggtggttcttggagaac

SEQ ID NO: 7837 - RNA, 21 nt, synthetic construct
  misc_feature 1..21: note = Synthetic
  source 1..21: mol_type = other RNA
ttaggtggttcttggagaaca

SEQ ID NO: 7838 - RNA, 21 nt, synthetic construct
  misc_feature 1..21: note = Synthetic
  source 1..21: mol_type = other RNA
taggtggttcttggagaacat

SEQ ID NO: 7839 - RNA, 21 nt, synthetic construct
  misc_feature 1..21: note = Synthetic
  source 1..21: mol_type = other RNA
aggtggttcttggagaacata

SEQ ID NO: 7840 - RNA, 21 nt, synthetic construct
  misc_feature 1..21: note = Synthetic
  source 1..21: mol_type = other RNA
ggtggttcttggagaacatat

SEQ ID NO: 7841 - RNA, 21 nt, synthetic construct
  misc_feature 1..21: note = Synthetic
  source 1..21: mol_type = other RNA
gtggttcttggagaacatatg

SEQ ID NO: 7842 - RNA, 21 nt, synthetic construct
  misc_feature 1..21: note = Synthetic
  source 1..21: mol_type = other RNA
tggttcttggagaacatatgc

SEQ ID NO: 7843 - RNA, 21 nt, synthetic construct
  misc_feature 1..21: note = Synthetic
  source 1..21: mol_type = other RNA
ggttcttggagaacatatgca

SEQ ID NO: 7844 - RNA, 21 nt, synthetic construct
  misc_feature 1..21: note = Synthetic
  source 1..21: mol_type = other RNA
gttcttggagaacatatgcat

SEQ ID NO: 7845 - RNA, 21 nt, synthetic construct
  misc_feature 1..21: note = Synthetic
  source 1..21: mol_type = other RNA
ttcttggagaacatatgcatt

SEQ ID NO: 7846 - RNA, 21 nt, synthetic construct
  misc_feature 1..21: note = Synthetic
  source 1..21: mol_type = other RNA
tcttggagaacatatgcattt

SEQ ID NO: 7847 - RNA, 21 nt, synthetic construct
  misc_feature 1..21: note = Synthetic
  source 1..21: mol_type = other RNA
cttggagaacatatgcattta

SEQ ID NO: 7848 - RNA, 21 nt, synthetic construct
  misc_feature 1..21: note = Synthetic
  source 1..21: mol_type = other RNA
ttggagaacatatgcatttaa

SEQ ID NO: 7849 - RNA, 21 nt, synthetic construct
  misc_feature 1..21: note = Synthetic
  source 1..21: mol_type = other RNA
tggagaacatatgcatttaat

SEQ ID NO: 7850 - RNA, 21 nt, synthetic construct
  misc_feature 1..21: note = Synthetic
  source 1..21: mol_type = other RNA
ggagaacatatgcatttaatt

SEQ ID NO: 7851 - RNA, 21 nt, synthetic construct
  misc_feature 1..21: note = Synthetic
  source 1..21: mol_type = other RNA
gagaacatatgcatttaattg

SEQ ID NO: 7852 - RNA, 21 nt, synthetic construct
  misc_feature 1..21: note = Synthetic
  source 1..21: mol_type = other RNA
agaacatatgcatttaattga

SEQ ID NO: 7853 - RNA, 21 nt, synthetic construct
  misc_feature 1..21: note = Synthetic
  source 1..21: mol_type = other RNA
gaacatatgcatttaattgaa

SEQ ID NO: 7854 - RNA, 21 nt, synthetic construct
  misc_feature 1..21: note = Synthetic
  source 1..21: mol_type = other RNA
aacatatgcatttaattgaac

SEQ ID NO: 7855 - RNA, 21 nt, synthetic construct
  misc_feature 1..21: note = Synthetic
  source 1..21: mol_type = other RNA
acatatgcatttaattgaact

SEQ ID NO: 7856 - RNA, 21 nt, synthetic construct
  misc_feature 1..21: note = Synthetic
  source 1..21: mol_type = other RNA
catatgcatttaattgaactt

SEQ ID NO: 7857 - RNA, 21 nt, synthetic construct
  misc_feature 1..21: note = Synthetic
  source 1..21: mol_type = other RNA
atatgcatttaattgaacttc

SEQ ID NO: 7858 - RNA, 21 nt, synthetic construct
  misc_feature 1..21: note = Synthetic
  source 1..21: mol_type = other RNA
tatgcatttaattgaacttca

SEQ ID NO: 7859 - RNA, 21 nt, synthetic construct
  misc_feature 1..21: note = Synthetic
  source 1..21: mol_type = other RNA
atgcatttaattgaacttcat

SEQ ID NO: 7860 - RNA, 21 nt, synthetic construct
  misc_feature 1..21: note = Synthetic
  source 1..21: mol_type = other RNA
tgcatttaattgaacttcatt

SEQ ID NO: 7861 - RNA, 21 nt, synthetic construct
  misc_feature 1..21: note = Synthetic
  source 1..21: mol_type = other RNA
gcatttaattgaacttcattc

SEQ ID NO: 7862 - RNA, 21 nt, synthetic construct
  misc_feature 1..21: note = Synthetic
  source 1..21: mol_type = other RNA
catttaattgaacttcattct

SEQ ID NO: 7863 - RNA, 21 nt, synthetic construct
  misc_feature 1..21: note = Synthetic
  source 1..21: mol_type = other RNA
atttaattgaacttcattctt

SEQ ID NO: 7864 - RNA, 21 nt, synthetic construct
  misc_feature 1..21: note = Synthetic
  source 1..21: mol_type = other RNA
tttaattgaacttcattctta

SEQ ID NO: 7865 - RNA, 21 nt, synthetic construct
  misc_feature 1..21: note = Synthetic
  source 1..21: mol_type = other RNA
ttaattgaacttcattcttag

SEQ ID NO: 7866 - RNA, 21 nt, synthetic construct
  misc_feature 1..21: note = Synthetic
  source 1..21: mol_type = other RNA
taattgaacttcattcttagg

SEQ ID NO: 7867 - RNA, 21 nt, synthetic construct
  misc_feature 1..21: note = Synthetic
  source 1..21: mol_type = other RNA
aattgaacttcattcttaggc

SEQ ID NO: 7868 - RNA, 21 nt, synthetic construct
  misc_feature 1..21: note = Synthetic
  source 1..21: mol_type = other RNA
attgaacttcattcttaggca

SEQ ID NO: 7869 - RNA, 21 nt, synthetic construct
  misc_feature 1..21: note = Synthetic
  source 1..21: mol_type = other RNA
ttgaacttcattcttaggcag

SEQ ID NO: 7870 - RNA, 21 nt, synthetic construct
  misc_feature 1..21: note = Synthetic
  source 1..21: mol_type = other RNA
tgaacttcattcttaggcagg

SEQ ID NO: 7871 - RNA, 21 nt, synthetic construct
  misc_feature 1..21: note = Synthetic
  source 1..21: mol_type = other RNA
gaacttcattcttaggcaggg

SEQ ID NO: 7872 - RNA, 21 nt, synthetic construct
  misc_feature 1..21: note = Synthetic
  source 1..21: mol_type = other RNA
aacttcattcttaggcagggt

SEQ ID NO: 7873 - RNA, 21 nt, synthetic construct
  misc_feature 1..21: note = Synthetic
  source 1..21: mol_type = other RNA
acttcattcttaggcagggtt

SEQ ID NO: 7874 - RNA, 21 nt, synthetic construct
  misc_feature 1..21: note = Synthetic
  source 1..21: mol_type = other RNA
cttcattcttaggcagggtta

SEQ ID NO: 7875 - RNA, 21 nt, synthetic construct
  misc_feature 1..21: note = Synthetic
  source 1..21: mol_type = other RNA
ttcattcttaggcagggttat

SEQ ID NO: 7876 - RNA, 21 nt, synthetic construct
  misc_feature 1..21: note = Synthetic
  source 1..21: mol_type = other RNA
tcattcttaggcagggttatc

SEQ ID NO: 7877 - RNA, 21 nt, synthetic construct
  misc_feature 1..21: note = Synthetic
  source 1..21: mol_type = other RNA
cattcttaggcagggttatct

SEQ ID NO: 7878 - RNA, 21 nt, synthetic construct
  misc_feature 1..21: note = Synthetic
  source 1..21: mol_type = other RNA
attcttaggcagggttatctg

SEQ ID NO: 7879 - RNA, 21 nt, synthetic construct
  misc_feature 1..21: note = Synthetic
  source 1..21: mol_type = other RNA
ttcttaggcagggttatctgg

SEQ ID NO: 7880 - RNA, 21 nt, synthetic construct
  misc_feature 1..21: note = Synthetic
  source 1..21: mol_type = other RNA
tcttaggcagggttatctgga

SEQ ID NO: 7881 - RNA, 21 nt, synthetic construct
  misc_feature 1..21: note = Synthetic
  source 1..21: mol_type = other RNA
cttaggcagggttatctggac

SEQ ID NO: 7882 - RNA, 21 nt, synthetic construct
  misc_feature 1..21: note = Synthetic
  source 1..21: mol_type = other RNA
ttaggcagggttatctggaca

SEQ ID NO: 7883 - RNA, 21 nt, synthetic construct
  misc_feature 1..21: note = Synthetic
  source 1..21: mol_type = other RNA
taggcagggttatctggacac

SEQ ID NO: 7884 - RNA, 21 nt, synthetic construct
  misc_feature 1..21: note = Synthetic
  source 1..21: mol_type = other RNA
aggcagggttatctggacact

SEQ ID NO: 7885 - RNA, 21 nt, synthetic construct
  misc_feature 1..21: note = Synthetic
  source 1..21: mol_type = other RNA
ggcagggttatctggacactc

SEQ ID NO: 7886 - RNA, 21 nt, synthetic construct
  misc_feature 1..21: note = Synthetic
  source 1..21: mol_type = other RNA
gcagggttatctggacactct

SEQ ID NO: 7887 - RNA, 21 nt, synthetic construct
  misc_feature 1..21: note = Synthetic
  source 1..21: mol_type = other RNA
cagggttatctggacactctc

SEQ ID NO: 7888 - RNA, 21 nt, synthetic construct
  misc_feature 1..21: note = Synthetic
  source 1..21: mol_type = other RNA
agggttatctggacactctct

SEQ ID NO: 7889 - RNA, 21 nt, synthetic construct
  misc_feature 1..21: note = Synthetic
  source 1..21: mol_type = other RNA
gggttatctggacactctctc

SEQ ID NO: 7890 - RNA, 21 nt, synthetic construct
  misc_feature 1..21: note = Synthetic
  source 1..21: mol_type = other RNA
ggttatctggacactctctcc

SEQ ID NO: 7891 - RNA, 21 nt, synthetic construct
  misc_feature 1..21: note = Synthetic
  source 1..21: mol_type = other RNA
gttatctggacactctctcca

SEQ ID NO: 7892 - RNA, 21 nt, synthetic construct
  misc_feature 1..21: note = Synthetic
  source 1..21: mol_type = other RNA
ttatctggacactctctccag

SEQ ID NO: 7893 - RNA, 21 nt, synthetic construct
  misc_feature 1..21: note = Synthetic
  source 1..21: mol_type = other RNA
tatctggacactctctccagc

SEQ ID NO: 7894 - RNA, 21 nt, synthetic construct
  misc_feature 1..21: note = Synthetic
  source 1..21: mol_type = other RNA
atctggacactctctccagca

SEQ ID NO: 7895 - RNA, 21 nt, synthetic construct
  misc_feature 1..21: note = Synthetic
  source 1..21: mol_type = other RNA
tctggacactctctccagcag

SEQ ID NO: 7896 - RNA, 21 nt, synthetic construct
  misc_feature 1..21: note = Synthetic
  source 1..21: mol_type = other RNA
ctggacactctctccagcaga

SEQ ID NO: 7897 - RNA, 21 nt, synthetic construct
  misc_feature 1..21: note = Synthetic
  source 1..21: mol_type = other RNA
tggacactctctccagcagat

SEQ ID NO: 7898 - RNA, 21 nt, synthetic construct
  misc_feature 1..21: note = Synthetic
  source 1..21: mol_type = other RNA
ggacactctctccagcagata

SEQ ID NO: 7899 - RNA, 21 nt, synthetic construct
  misc_feature 1..21: note = Synthetic
  source 1..21: mol_type = other RNA
gacactctctccagcagatac

SEQ ID NO: 7900 - RNA, 21 nt, synthetic construct
  misc_feature 1..21: note = Synthetic
  source 1..21: mol_type = other RNA
acactctctccagcagatacc

SEQ ID NO: 7901 - RNA, 21 nt, synthetic construct
  misc_feature 1..21: note = Synthetic
  source 1..21: mol_type = other RNA
cactctctccagcagatacca

SEQ ID NO: 7902 - RNA, 21 nt, synthetic construct
  misc_feature 1..21: note = Synthetic
  source 1..21: mol_type = other RNA
actctctccagcagataccac

SEQ ID NO: 7903 - RNA, 21 nt, synthetic construct
  misc_feature 1..21: note = Synthetic
  source 1..21: mol_type = other RNA
ctctctccagcagataccacc

SEQ ID NO: 7904 - RNA, 21 nt, synthetic construct
  misc_feature 1..21: note = Synthetic
  source 1..21: mol_type = other RNA
tctctccagcagataccacca

SEQ ID NO: 7905 - RNA, 21 nt, synthetic construct
  misc_feature 1..21: note = Synthetic
  source 1..21: mol_type = other RNA
ctctccagcagataccaccag

SEQ ID NO: 7906 - RNA, 21 nt, synthetic construct
  misc_feature 1..21: note = Synthetic
  source 1..21: mol_type = other RNA
tctccagcagataccaccagt

SEQ ID NO: 7907 - RNA, 21 nt, synthetic construct
  misc_feature 1..21: note = Synthetic
  source 1..21: mol_type = other RNA
ctccagcagataccaccagtt

SEQ ID NO: 7908 - RNA, 21 nt, synthetic construct
  misc_feature 1..21: note = Synthetic
  source 1..21: mol_type = other RNA
tccagcagataccaccagttc

SEQ ID NO: 7909 - RNA, 21 nt, synthetic construct
  misc_feature 1..21: note = Synthetic
  source 1..21: mol_type = other RNA
ccagcagataccaccagttcc

SEQ ID NO: 7910 - RNA, 21 nt, synthetic construct
  misc_feature 1..21: note = Synthetic
  source 1..21: mol_type = other RNA
cagcagataccaccagttcct

SEQ ID NO: 7911 - RNA, 21 nt, synthetic construct
  misc_feature 1..21: note = Synthetic
  source 1..21: mol_type = other RNA
agcagataccaccagttcctt

SEQ ID NO: 7912 - RNA, 21 nt, synthetic construct
  misc_feature 1..21: note = Synthetic
  source 1..21: mol_type = other RNA
gcagataccaccagttccttt

SEQ ID NO: 7913 - RNA, 21 nt, synthetic construct
  misc_feature 1..21: note = Synthetic
  source 1..21: mol_type = other RNA
cagataccaccagttccttta

SEQ ID NO: 7914 - RNA, 21 nt, synthetic construct
  misc_feature 1..21: note = Synthetic
  source 1..21: mol_type = other RNA
agataccaccagttcctttat

SEQ ID NO: 7915 - RNA, 21 nt, synthetic construct
  misc_feature 1..21: note = Synthetic
  source 1..21: mol_type = other RNA
gataccaccagttcctttata

SEQ ID NO: 7916 - RNA, 21 nt, synthetic construct
  misc_feature 1..21: note = Synthetic
  source 1..21: mol_type = other RNA
ataccaccagttcctttataa

SEQ ID NO: 7917 - RNA, 21 nt, synthetic construct
  misc_feature 1..21: note = Synthetic
  source 1..21: mol_type = other RNA
taccaccagttcctttataac

SEQ ID NO: 7918 - RNA, 21 nt, synthetic construct
  misc_feature 1..21: note = Synthetic
  source 1..21: mol_type = other RNA
accaccagttcctttataact

SEQ ID NO: 7919 - RNA, 21 nt, synthetic construct
  misc_feature 1..21: note = Synthetic
  source 1..21: mol_type = other RNA
ccaccagttcctttataactg

SEQ ID NO: 7920 - RNA, 21 nt, synthetic construct
  misc_feature 1..21: note = Synthetic
  source 1..21: mol_type = other RNA
caccagttcctttataactgg

SEQ ID NO: 7921 - RNA, 21 nt, synthetic construct
  misc_feature 1..21: note = Synthetic
  source 1..21: mol_type = other RNA
accagttcctttataactggg

SEQ ID NO: 7922 - RNA, 21 nt, synthetic construct
  misc_feature 1..21: note = Synthetic
  source 1..21: mol_type = other RNA
ccagttcctttataactgggt

SEQ ID NO: 7923 - RNA, 21 nt, synthetic construct
  misc_feature 1..21: note = Synthetic
  source 1..21: mol_type = other RNA
cagttcctttataactgggta

SEQ ID NO: 7924 - RNA, 21 nt, synthetic construct
  misc_feature 1..21: note = Synthetic
  source 1..21: mol_type = other RNA
agttcctttataactgggtat

SEQ ID NO: 7925 - RNA, 21 nt, synthetic construct
  misc_feature 1..21: note = Synthetic
  source 1..21: mol_type = other RNA
gttcctttataactgggtatg

SEQ ID NO: 7926 - RNA, 21 nt, synthetic construct
  misc_feature 1..21: note = Synthetic
  source 1..21: mol_type = other RNA
ttcctttataactgggtatgg

SEQ ID NO: 7927 - RNA, 21 nt, synthetic construct
  misc_feature 1..21: note = Synthetic
  source 1..21: mol_type = other RNA
tcctttataactgggtatggt

SEQ ID NO: 7928 - RNA, 21 nt, synthetic construct
  misc_feature 1..21: note = Synthetic
  source 1..21: mol_type = other RNA
cctttataactgggtatggtg

SEQ ID NO: 7929 - RNA, 21 nt, synthetic construct
  misc_feature 1..21: note = Synthetic
  source 1..21: mol_type = other RNA
ctttataactgggtatggtgc

SEQ ID NO: 7930 - RNA, 21 nt, synthetic construct
  misc_feature 1..21: note = Synthetic
  source 1..21: mol_type = other RNA
tttataactgggtatggtgct

SEQ ID NO: 7931 - RNA, 21 nt, synthetic construct
  misc_feature 1..21: note = Synthetic
  source 1..21: mol_type = other RNA
ttataactgggtatggtgctg

SEQ ID NO: 7932 - RNA, 21 nt, synthetic construct
  misc_feature 1..21: note = Synthetic
  source 1..21: mol_type = other RNA
tataactgggtatggtgctga

SEQ ID NO: 7933 - RNA, 21 nt, synthetic construct
  misc_feature 1..21: note = Synthetic
  source 1..21: mol_type = other RNA
ataactgggtatggtgctgag

SEQ ID NO: 7934 - RNA, 21 nt, synthetic construct
  misc_feature 1..21: note = Synthetic
  source 1..21: mol_type = other RNA
taactgggtatggtgctgagg

SEQ ID NO: 7935 - RNA, 21 nt, synthetic construct
  misc_feature 1..21: note = Synthetic
  source 1..21: mol_type = other RNA
aactgggtatggtgctgaggt

SEQ ID NO: 7936 - RNA, 21 nt, synthetic construct
  misc_feature 1..21: note = Synthetic
  source 1..21: mol_type = other RNA
actgggtatggtgctgaggtg

SEQ ID NO: 7937 - RNA, 21 nt, synthetic construct
  misc_feature 1..21: note = Synthetic
  source 1..21: mol_type = other RNA
ctgggtatggtgctgaggtgc

SEQ ID NO: 7938 - RNA, 21 nt, synthetic construct
  misc_feature 1..21: note = Synthetic
  source 1..21: mol_type = other RNA
tgggtatggtgctgaggtgct

SEQ ID NO: 7939 - RNA, 21 nt, synthetic construct
  misc_feature 1..21: note = Synthetic
  source 1..21: mol_type = other RNA
gggtatggtgctgaggtgctc

SEQ ID NO: 7940 - RNA, 21 nt, synthetic construct
  misc_feature 1..21: note = Synthetic
  source 1..21: mol_type = other RNA
ggtatggtgctgaggtgctct

SEQ ID NO: 7941 - RNA, 21 nt, synthetic construct
  misc_feature 1..21: note = Synthetic
  source 1..21: mol_type = other RNA
gtatggtgctgaggtgctctg

SEQ ID NO: 7942 - RNA, 21 nt, synthetic construct
  misc_feature 1..21: note = Synthetic
  source 1..21: mol_type = other RNA
tatggtgctgaggtgctctgg

SEQ ID NO: 7943 - RNA, 21 nt, synthetic construct
  misc_feature 1..21: note = Synthetic
  source 1..21: mol_type = other RNA
atggtgctgaggtgctctgga

SEQ ID NO: 7944 - RNA, 21 nt, synthetic construct
  misc_feature 1..21: note = Synthetic
  source 1..21: mol_type = other RNA
tggtgctgaggtgctctggaa

SEQ ID NO: 7945 - RNA, 21 nt, synthetic construct
  misc_feature 1..21: note = Synthetic
  source 1..21: mol_type = other RNA
ggtgctgaggtgctctggaaa

SEQ ID NO: 7946 - RNA, 21 nt, synthetic construct
  misc_feature 1..21: note = Synthetic
  source 1..21: mol_type = other RNA
gtgctgaggtgctctggaaag

SEQ ID NO: 7947 - RNA, 21 nt, synthetic construct
  misc_feature 1..21: note = Synthetic
  source 1..21: mol_type = other RNA
tgctgaggtgctctggaaaga

SEQ ID NO: 7948 - RNA, 21 nt, synthetic construct
  misc_feature 1..21: note = Synthetic
  source 1..21: mol_type = other RNA
gctgaggtgctctggaaagag

SEQ ID NO: 7949 - RNA, 21 nt, synthetic construct
  misc_feature 1..21: note = Synthetic
  source 1..21: mol_type = other RNA
ctgaggtgctctggaaagagg

SEQ ID NO: 7950 - RNA, 21 nt, synthetic construct
  misc_feature 1..21: note = Synthetic
  source 1..21: mol_type = other RNA
tgaggtgctctggaaagaggc

SEQ ID NO: 7951 - RNA, 21 nt, synthetic construct
  misc_feature 1..21: note = Synthetic
  source 1..21: mol_type = other RNA
gaggtgctctggaaagaggcc

SEQ ID NO: 7952 - RNA, 21 nt, synthetic construct
  misc_feature 1..21: note = Synthetic
  source 1..21: mol_type = other RNA
aggtgctctggaaagaggcct

SEQ ID NO: 7953 - RNA, 21 nt, synthetic construct
  misc_feature 1..21: note = Synthetic
  source 1..21: mol_type = other RNA
ggtgctctggaaagaggcctg

SEQ ID NO: 7954 - RNA, 21 nt, synthetic construct
  misc_feature 1..21: note = Synthetic
  source 1..21: mol_type = other RNA
gtgctctggaaagaggcctgg

SEQ ID NO: 7955 - RNA, 21 nt, synthetic construct
  misc_feature 1..21: note = Synthetic
  source 1..21: mol_type = other RNA
tgctctggaaagaggcctggg

SEQ ID NO: 7956 - RNA, 21 nt, synthetic construct
  misc_feature 1..21: note = Synthetic
  source 1..21: mol_type = other RNA
gctctggaaagaggcctgggg

SEQ ID NO: 7957 - RNA, 21 nt, synthetic construct
  misc_feature 1..21: note = Synthetic
  source 1..21: mol_type = other RNA
ctctggaaagaggcctggggg

SEQ ID NO: 7958 - RNA, 21 nt, synthetic construct
  misc_feature 1..21: note = Synthetic
  source 1..21: mol_type = other RNA
tctggaaagaggcctgggggg

SEQ ID NO: 7959 - RNA, 21 nt, synthetic construct
  misc_feature 1..21: note = Synthetic
  source 1..21: mol_type = other RNA
ctggaaagaggcctggggggt

SEQ ID NO: 7960 - RNA, 21 nt, synthetic construct
  misc_feature 1..21: note = Synthetic
  source 1..21: mol_type = other RNA
tggaaagaggcctggggggta

SEQ ID NO: 7961 - RNA, 21 nt, synthetic construct
  misc_feature 1..21: note = Synthetic
  source 1..21: mol_type = other RNA
ggaaagaggcctggggggtag

SEQ ID NO: 7962 - RNA, 21 nt, synthetic construct
  misc_feature 1..21: note = Synthetic
  source 1..21: mol_type = other RNA
gaaagaggcctggggggtagg

SEQ ID NO: 7963 - RNA, 21 nt, synthetic construct
  misc_feature 1..21: note = Synthetic
  source 1..21: mol_type = other RNA
aaagaggcctggggggtaggg

SEQ ID NO: 7964 - RNA, 21 nt, synthetic construct
  misc_feature 1..21: note = Synthetic
  source 1..21: mol_type = other RNA
aagaggcctggggggtagggg

SEQ ID NO: 7965 - RNA, 21 nt, synthetic construct
  misc_feature 1..21: note = Synthetic
  source 1..21: mol_type = other RNA
agaggcctggggggtaggggt

SEQ ID NO: 7966 - RNA, 21 nt, synthetic construct
  misc_feature 1..21: note = Synthetic
  source 1..21: mol_type = other RNA
gaggcctggggggtaggggta

SEQ ID NO: 7967 - RNA, 21 nt, synthetic construct
  misc_feature 1..21: note = Synthetic
  source 1..21: mol_type = other RNA
aggcctggggggtaggggtag

SEQ ID NO: 7968 - RNA, 21 nt, synthetic construct
  misc_feature 1..21: note = Synthetic
  source 1..21: mol_type = other RNA
ggcctggggggtaggggtagc

SEQ ID NO: 7969 - RNA, 21 nt, synthetic construct
  misc_feature 1..21: note = Synthetic
  source 1..21: mol_type = other RNA
gcctggggggtaggggtagca

SEQ ID NO: 7970 - RNA, 21 nt, synthetic construct
  misc_feature 1..21: note = Synthetic
  source 1..21: mol_type = other RNA
cctggggggtaggggtagcat

SEQ ID NO: 7971 - RNA, 21 nt, synthetic construct
  misc_feature 1..21: note = Synthetic
  source 1..21: mol_type = other RNA
ctggggggtaggggtagcata

SEQ ID NO: 7972 - RNA, 21 nt, synthetic construct
  misc_feature 1..21: note = Synthetic
  source 1..21: mol_type = other RNA
tggggggtaggggtagcataa

SEQ ID NO: 7973 - RNA, 21 nt, synthetic construct
  misc_feature 1..21: note = Synthetic
  source 1..21: mol_type = other RNA
ggggggtaggggtagcataac

SEQ ID NO: 7974 - RNA, 21 nt, synthetic construct
  misc_feature 1..21: note = Synthetic
  source 1..21: mol_type = other RNA
gggggtaggggtagcataact

SEQ ID NO: 7975 - RNA, 21 nt, synthetic construct
  misc_feature 1..21: note = Synthetic
  source 1..21: mol_type = other RNA
ggggtaggggtagcataactg

SEQ ID NO: 7976 - RNA, 21 nt, synthetic construct
  misc_feature 1..21: note = Synthetic
  source 1..21: mol_type = other RNA
gggtaggggtagcataactgt

SEQ ID NO: 7977 - RNA, 21 nt, synthetic construct
  misc_feature 1..21: note = Synthetic
  source 1..21: mol_type = other RNA
ggtaggggtagcataactgta

SEQ ID NO: 7978 - RNA, 21 nt, synthetic construct
  misc_feature 1..21: note = Synthetic
  source 1..21: mol_type = other RNA
gtaggggtagcataactgtag

SEQ ID NO: 7979 - RNA, 21 nt, synthetic construct
  misc_feature 1..21: note = Synthetic
  source 1..21: mol_type = other RNA
taggggtagcataactgtagg

SEQ ID NO: 7980 - RNA, 21 nt, synthetic construct
  misc_feature 1..21: note = Synthetic
  source 1..21: mol_type = other RNA
aggggtagcataactgtagga

SEQ ID NO: 7981 - RNA, 21 nt, synthetic construct
  misc_feature 1..21: note = Synthetic
  source 1..21: mol_type = other RNA
ggggtagcataactgtaggag

SEQ ID NO: 7982 - RNA, 21 nt, synthetic construct
  misc_feature 1..21: note = Synthetic
  source 1..21: mol_type = other RNA
gggtagcataactgtaggagg

SEQ ID NO: 7983 - RNA, 21 nt, synthetic construct
  misc_feature 1..21: note = Synthetic
  source 1..21: mol_type = other RNA
ggtagcataactgtaggaggg

SEQ ID NO: 7984 - RNA, 21 nt, synthetic construct
  misc_feature 1..21: note = Synthetic
  source 1..21: mol_type = other RNA
gtagcataactgtaggaggga

SEQ ID NO: 7985 - RNA, 21 nt, synthetic construct
  misc_feature 1..21: note = Synthetic
  source 1..21: mol_type = other RNA
tagcataactgtaggagggag

SEQ ID NO: 7986 - RNA, 21 nt, synthetic construct
  misc_feature 1..21: note = Synthetic
  source 1..21: mol_type = other RNA
agcataactgtaggagggagc

SEQ ID NO: 7987 - RNA, 21 nt, synthetic construct
  misc_feature 1..21: note = Synthetic
  source 1..21: mol_type = other RNA
gcataactgtaggagggagcc

SEQ ID NO: 7988 - RNA, 21 nt, synthetic construct
  misc_feature 1..21: note = Synthetic
  source 1..21: mol_type = other RNA
cataactgtaggagggagcca

SEQ ID NO: 7989 - RNA, 21 nt, synthetic construct
  misc_feature 1..21: note = Synthetic
  source 1..21: mol_type = other RNA
ataactgtaggagggagccac

SEQ ID NO: 7990 - RNA, 21 nt, synthetic construct
  misc_feature 1..21: note = Synthetic
  source 1..21: mol_type = other RNA
taactgtaggagggagccact

SEQ ID NO: 7991 - RNA, 21 nt, synthetic construct
  misc_feature 1..21: note = Synthetic
  source 1..21: mol_type = other RNA
aactgtaggagggagccactg

SEQ ID NO: 7992 - RNA, 21 nt, synthetic construct
  misc_feature 1..21: note = Synthetic
  source 1..21: mol_type = other RNA
actgtaggagggagccactgg

SEQ ID NO: 7993 - RNA, 21 nt, synthetic construct
  misc_feature 1..21: note = Synthetic
  source 1..21: mol_type = other RNA
ctgtaggagggagccactggc

SEQ ID NO: 7994 - RNA, 21 nt, synthetic construct
  misc_feature 1..21: note = Synthetic
  source 1..21: mol_type = other RNA
tgtaggagggagccactggct

SEQ ID NO: 7995 - RNA, 21 nt, synthetic construct
  misc_feature 1..21: note = Synthetic
  source 1..21: mol_type = other RNA
gtaggagggagccactggctg

SEQ ID NO: 7996 - RNA, 21 nt, synthetic construct
  misc_feature 1..21: note = Synthetic
  source 1..21: mol_type = other RNA
taggagggagccactggctgg

SEQ ID NO: 7997 - RNA, 21 nt, synthetic construct
  misc_feature 1..21: note = Synthetic
  source 1..21: mol_type = other RNA
aggagggagccactggctggg

SEQ ID NO: 7998 - RNA, 21 nt, synthetic construct
  misc_feature 1..21: note = Synthetic
  source 1..21: mol_type = other RNA
ggagggagccactggctgggg

SEQ ID NO: 7999 - RNA, 21 nt, synthetic construct
  misc_feature 1..21: note = Synthetic
  source 1..21: mol_type = other RNA
gagggagccactggctggggg

SEQ ID NO: 8000 - RNA, 21 nt, synthetic construct
  misc_feature 1..21: note = Synthetic
  source 1..21: mol_type = other RNA
agggagccactggctggggga

SEQ ID NO: 8001 - RNA, 21 nt, synthetic construct
  misc_feature 1..21: note = Synthetic
  source 1..21: mol_type = other RNA
gggagccactggctgggggac

SEQ ID NO: 8002 - RNA, 21 nt, synthetic construct
  misc_feature 1..21: note = Synthetic
  source 1..21: mol_type = other RNA
ggagccactggctgggggaca

SEQ ID NO: 8003 - RNA, 21 nt, synthetic construct
  misc_feature 1..21: note = Synthetic
  source 1..21: mol_type = other RNA
gagccactggctgggggacag

SEQ ID NO: 8004 - RNA, 21 nt, synthetic construct
  misc_feature 1..21: note = Synthetic
  source 1..21: mol_type = other RNA
agccactggctgggggacagc

SEQ ID NO: 8005 - RNA, 21 nt, synthetic construct
  misc_feature 1..21: note = Synthetic
  source 1..21: mol_type = other RNA
gccactggctgggggacagca

SEQ ID NO: 8006 - RNA, 21 nt, synthetic construct
  misc_feature 1..21: note = Synthetic
  source 1..21: mol_type = other RNA
ccactggctgggggacagcaa

SEQ ID NO: 8007 - RNA, 21 nt, synthetic construct
  misc_feature 1..21: note = Synthetic
  source 1..21: mol_type = other RNA
cactggctgggggacagcaat

SEQ ID NO: 8008 - RNA, 21 nt, synthetic construct
  misc_feature 1..21: note = Synthetic
  source 1..21: mol_type = other RNA
actggctgggggacagcaatc

SEQ ID NO: 8009 - RNA, 21 nt, synthetic construct
  misc_feature 1..21: note = Synthetic
  source 1..21: mol_type = other RNA
ctggctgggggacagcaatct

SEQ ID NO: 8010 - RNA, 21 nt, synthetic construct
  misc_feature 1..21: note = Synthetic
  source 1..21: mol_type = other RNA
tggctgggggacagcaatctg

SEQ ID NO: 8011 - RNA, 21 nt, synthetic construct
  misc_feature 1..21: note = Synthetic
  source 1..21: mol_type = other RNA
ggctgggggacagcaatctgg

SEQ ID NO: 8012 - RNA, 21 nt, synthetic construct
  misc_feature 1..21: note = Synthetic
  source 1..21: mol_type = other RNA
gctgggggacagcaatctggg

SEQ ID NO: 8013 - RNA, 21 nt, synthetic construct
  misc_feature 1..21: note = Synthetic
  source 1..21: mol_type = other RNA
ctgggggacagcaatctgggt

SEQ ID NO: 8014 - RNA, 21 nt, synthetic construct
  misc_feature 1..21: note = Synthetic
  source 1..21: mol_type = other RNA
tgggggacagcaatctgggtt

SEQ ID NO: 8015 - RNA, 21 nt, synthetic construct
  misc_feature 1..21: note = Synthetic
  source 1..21: mol_type = other RNA
gggggacagcaatctgggttt

SEQ ID NO: 8016 - RNA, 21 nt, synthetic construct
  misc_feature 1..21: note = Synthetic
  source 1..21: mol_type = other RNA
ggggacagcaatctgggtttt

SEQ ID NO: 8017 - RNA, 21 nt, synthetic construct
  misc_feature 1..21: note = Synthetic
  source 1..21: mol_type = other RNA
gggacagcaatctgggttttc

SEQ ID NO: 8018 - RNA, 21 nt, synthetic construct
  misc_feature 1..21: note = Synthetic
  source 1..21: mol_type = other RNA
ggacagcaatctgggttttct

SEQ ID NO: 8019 - RNA, 21 nt, synthetic construct
  misc_feature 1..21: note = Synthetic
  source 1..21: mol_type = other RNA
gacagcaatctgggttttctc

SEQ ID NO: 8020 - RNA, 21 nt, synthetic construct
  misc_feature 1..21: note = Synthetic
  source 1..21: mol_type = other RNA
acagcaatctgggttttctca

SEQ ID NO: 8021 - RNA, 21 nt, synthetic construct
  misc_feature 1..21: note = Synthetic
  source 1..21: mol_type = other RNA
cagcaatctgggttttctcag

SEQ ID NO: 8022 - RNA, 21 nt, synthetic construct
  misc_feature 1..21: note = Synthetic
  source 1..21: mol_type = other RNA
agcaatctgggttttctcaga

SEQ ID NO: 8023 - RNA, 21 nt, synthetic construct
  misc_feature 1..21: note = Synthetic
  source 1..21: mol_type = other RNA
gcaatctgggttttctcagaa

SEQ ID NO: 8024 - RNA, 21 nt, synthetic construct
  misc_feature 1..21: note = Synthetic
  source 1..21: mol_type = other RNA
caatctgggttttctcagaac

SEQ ID NO: 8025 - RNA, 21 nt, synthetic construct
  misc_feature 1..21: note = Synthetic
  source 1..21: mol_type = other RNA
aatctgggttttctcagaact

SEQ ID NO: 8026 - RNA, 21 nt, synthetic construct
  misc_feature 1..21: note = Synthetic
  source 1..21: mol_type = other RNA
atctgggttttctcagaactt

SEQ ID NO: 8027 - RNA, 21 nt, synthetic construct
  misc_feature 1..21: note = Synthetic
  source 1..21: mol_type = other RNA
tctgggttttctcagaacttt

SEQ ID NO: 8028 - RNA, 21 nt, synthetic construct
  misc_feature 1..21: note = Synthetic
  source 1..21: mol_type = other RNA
ctgggttttctcagaactttt

SEQ ID NO: 8029 - RNA, 21 nt, synthetic construct
  misc_feature 1..21: note = Synthetic
  source 1..21: mol_type = other RNA
tgggttttctcagaacttttt

SEQ ID NO: 8030 - RNA, 21 nt, synthetic construct
  misc_feature 1..21: note = Synthetic
  source 1..21: mol_type = other RNA
gggttttctcagaacttttta

SEQ ID NO: 8031 - RNA, 21 nt, synthetic construct
  misc_feature 1..21: note = Synthetic
  source 1..21: mol_type = other RNA
ggttttctcagaactttttac

SEQ ID NO: 8032 - RNA, 21 nt, synthetic construct
  misc_feature 1..21: note = Synthetic
  source 1..21: mol_type = other RNA
gttttctcagaactttttact

SEQ ID NO: 8033 - RNA, 21 nt, synthetic construct
  misc_feature 1..21: note = Synthetic
  source 1..21: mol_type = other RNA
ttttctcagaactttttactt

SEQ ID NO: 8034 - RNA, 21 nt, synthetic construct
  misc_feature 1..21: note = Synthetic
  source 1..21: mol_type = other RNA
tttctcagaactttttacttg

SEQ ID NO: 8035 - RNA, 21 nt, synthetic construct
  misc_feature 1..21: note = Synthetic
  source 1..21: mol_type = other RNA
ttctcagaactttttacttgt

SEQ ID NO: 8036 - RNA, 21 nt, synthetic construct
  misc_feature 1..21: note = Synthetic
  source 1..21: mol_type = other RNA
tctcagaactttttacttgtt

SEQ ID NO: 8037 - RNA, 21 nt, synthetic construct
  misc_feature 1..21: note = Synthetic
  source 1..21: mol_type = other RNA
ctcagaactttttacttgttg

SEQ ID NO: 8038 - RNA, 21 nt, synthetic construct
  misc_feature 1..21: note = Synthetic
  source 1..21: mol_type = other RNA
tcagaactttttacttgttga

SEQ ID NO: 8039 - RNA, 21 nt, synthetic construct
  misc_feature 1..21: note = Synthetic
  source 1..21: mol_type = other RNA
cagaactttttacttgttgag

SEQ ID NO: 8040 - RNA, 21 nt, synthetic construct
  misc_feature 1..21: note = Synthetic
  source 1..21: mol_type = other RNA
agaactttttacttgttgagt

SEQ ID NO: 8041 - RNA, 21 nt, synthetic construct
  misc_feature 1..21: note = Synthetic
  source 1..21: mol_type = other RNA
gaactttttacttgttgagtg

SEQ ID NO: 8042 - RNA, 21 nt, synthetic construct
  misc_feature 1..21: note = Synthetic
  source 1..21: mol_type = other RNA
aactttttacttgttgagtgc

SEQ ID NO: 8043 - RNA, 21 nt, synthetic construct
  misc_feature 1..21: note = Synthetic
  source 1..21: mol_type = other RNA
actttttacttgttgagtgct

SEQ ID NO: 8044 - RNA, 21 nt, synthetic construct
  misc_feature 1..21: note = Synthetic
  source 1..21: mol_type = other RNA
ctttttacttgttgagtgctg

SEQ ID NO: 8045 - RNA, 21 nt, synthetic construct
  misc_feature 1..21: note = Synthetic
  source 1..21: mol_type = other RNA
tttttacttgttgagtgctgg

SEQ ID NO: 8046 - RNA, 21 nt, synthetic construct
  misc_feature 1..21: note = Synthetic
  source 1..21: mol_type = other RNA
ttttacttgttgagtgctggg

SEQ ID NO: 8047 - RNA, 21 nt, synthetic construct
  misc_feature 1..21: note = Synthetic
  source 1..21: mol_type = other RNA
tttacttgttgagtgctgggc

SEQ ID NO: 8048 - RNA, 21 nt, synthetic construct
  misc_feature 1..21: note = Synthetic
  source 1..21: mol_type = other RNA
ttacttgttgagtgctgggcg

SEQ ID NO: 8049 - RNA, 21 nt, synthetic construct
  misc_feature 1..21: note = Synthetic
  source 1..21: mol_type = other RNA
tacttgttgagtgctgggcgt

SEQ ID NO: 8050 - RNA, 21 nt, synthetic construct
  misc_feature 1..21: note = Synthetic
  source 1..21: mol_type = other RNA
acttgttgagtgctgggcgta

SEQ ID NO: 8051 - RNA, 21 nt, synthetic construct
  misc_feature 1..21: note = Synthetic
  source 1..21: mol_type = other RNA
cttgttgagtgctgggcgtag

SEQ ID NO: 8052 - RNA, 21 nt, synthetic construct
  misc_feature 1..21: note = Synthetic
  source 1..21: mol_type = other RNA
ttgttgagtgctgggcgtagt

SEQ ID NO: 8053 - RNA, 21 nt, synthetic construct
  misc_feature 1..21: note = Synthetic
  source 1..21: mol_type = other RNA
tgttgagtgctgggcgtagta

SEQ ID NO: 8054 - RNA, 21 nt, synthetic construct
  misc_feature 1..21: note = Synthetic
  source 1..21: mol_type = other RNA
gttgagtgctgggcgtagtag

SEQ ID NO: 8055 - RNA, 21 nt, synthetic construct
  misc_feature 1..21: note = Synthetic
  source 1..21: mol_type = other RNA
ttgagtgctgggcgtagtagc

SEQ ID NO: 8056 - RNA, 21 nt, synthetic construct
  misc_feature 1..21: note = Synthetic
  source 1..21: mol_type = other RNA
tgagtgctgggcgtagtagca

SEQ ID NO: 8057 - RNA, 21 nt, synthetic construct
  misc_feature 1..21: note = Synthetic
  source 1..21: mol_type = other RNA
gagtgctgggcgtagtagcaa

SEQ ID NO: 8058 - RNA, 21 nt, synthetic construct
  misc_feature 1..21: note = Synthetic
  source 1..21: mol_type = other RNA
agtgctgggcgtagtagcaag

SEQ ID NO: 8059 - RNA, 21 nt, synthetic construct
  misc_feature 1..21: note = Synthetic
  source 1..21: mol_type = other RNA
gtgctgggcgtagtagcaaga

SEQ ID NO: 8060 - RNA, 21 nt, synthetic construct
  misc_feature 1..21: note = Synthetic
  source 1..21: mol_type = other RNA
tgctgggcgtagtagcaagac

SEQ ID NO: 8061 - RNA, 21 nt, synthetic construct
  misc_feature 1..21: note = Synthetic
  source 1..21: mol_type = other RNA
gctgggcgtagtagcaagacc

SEQ ID NO: 8062 - RNA, 21 nt, synthetic construct
  misc_feature 1..21: note = Synthetic
  source 1..21: mol_type = other RNA
ctgggcgtagtagcaagaccc

SEQ ID NO: 8063 - RNA, 21 nt, synthetic construct
  misc_feature 1..21: note = Synthetic
  source 1..21: mol_type = other RNA
tgggcgtagtagcaagaccct

SEQ ID NO: 8064 - RNA, 21 nt, synthetic construct
  misc_feature 1..21: note = Synthetic
  source 1..21: mol_type = other RNA
gggcgtagtagcaagaccctc

SEQ ID NO: 8065 - RNA, 21 nt, synthetic construct
  misc_feature 1..21: note = Synthetic
  source 1..21: mol_type = other RNA
ggcgtagtagcaagaccctct

SEQ ID NO: 8066 - RNA, 21 nt, synthetic construct
  misc_feature 1..21: note = Synthetic
  source 1..21: mol_type = other RNA
gcgtagtagcaagaccctctg

SEQ ID NO: 8067 - RNA, 21 nt, synthetic construct
  misc_feature 1..21: note = Synthetic
  source 1..21: mol_type = other RNA
cgtagtagcaagaccctctga

SEQ ID NO: 8068 - RNA, 21 nt, synthetic construct
  misc_feature 1..21: note = Synthetic
  source 1..21: mol_type = other RNA
gtagtagcaagaccctctgat

SEQ ID NO: 8069 - RNA, 21 nt, synthetic construct
  misc_feature 1..21: note = Synthetic
  source 1..21: mol_type = other RNA
tagtagcaagaccctctgata

SEQ ID NO: 8070 - RNA, 21 nt, synthetic construct
  misc_feature 1..21: note = Synthetic
  source 1..21: mol_type = other RNA
agtagcaagaccctctgatat

SEQ ID NO: 8071 - RNA, 21 nt, synthetic construct
  misc_feature 1..21: note = Synthetic
  source 1..21: mol_type = other RNA
gtagcaagaccctctgatatt

SEQ ID NO: 8072 - RNA, 21 nt, synthetic construct
  misc_feature 1..21: note = Synthetic
  source 1..21: mol_type = other RNA
tagcaagaccctctgatattt

SEQ ID NO: 8073 - RNA, 21 nt, synthetic construct
  misc_feature 1..21: note = Synthetic
  source 1..21: mol_type = other RNA
agcaagaccctctgatatttc

SEQ ID NO: 8074 - RNA, 21 nt, synthetic construct
  misc_feature 1..21: note = Synthetic
  source 1..21: mol_type = other RNA
gcaagaccctctgatatttca

SEQ ID NO: 8075 - RNA, 21 nt, synthetic construct
  misc_feature 1..21: note = Synthetic
  source 1..21: mol_type = other RNA
caagaccctctgatatttcag

SEQ ID NO: 8076 - RNA, 21 nt, synthetic construct
  misc_feature 1..21: note = Synthetic
  source 1..21: mol_type = other RNA
aagaccctctgatatttcagg

SEQ ID NO: 8077 - RNA, 21 nt, synthetic construct
  misc_feature 1..21: note = Synthetic
  source 1..21: mol_type = other RNA
agaccctctgatatttcaggt

SEQ ID NO: 8078 - RNA, 21 nt, synthetic construct
  misc_feature 1..21: note = Synthetic
  source 1..21: mol_type = other RNA
gaccctctgatatttcaggtt

SEQ ID NO: 8079 - RNA, 21 nt, synthetic construct
  misc_feature 1..21: note = Synthetic
  source 1..21: mol_type = other RNA
accctctgatatttcaggttg

SEQ ID NO: 8080 - RNA, 21 nt, synthetic construct
  misc_feature 1..21: note = Synthetic
  source 1..21: mol_type = other RNA
ccctctgatatttcaggttgc

SEQ ID NO: 8081 - RNA, 21 nt, synthetic construct
  misc_feature 1..21: note = Synthetic
  source 1..21: mol_type = other RNA
cctctgatatttcaggttgca

SEQ ID NO: 8082 - RNA, 21 nt, synthetic construct
  misc_feature 1..21: note = Synthetic
  source 1..21: mol_type = other RNA
ctctgatatttcaggttgcac

SEQ ID NO: 8083 - RNA, 21 nt, synthetic construct
  misc_feature 1..21: note = Synthetic
  source 1..21: mol_type = other RNA
tctgatatttcaggttgcact

SEQ ID NO: 8084 - RNA, 21 nt, synthetic construct
  misc_feature 1..21: note = Synthetic
  source 1..21: mol_type = other RNA
ctgatatttcaggttgcactg

SEQ ID NO: 8085 - RNA, 21 nt, synthetic construct
  misc_feature 1..21: note = Synthetic
  source 1..21: mol_type = other RNA
tgatatttcaggttgcactga

SEQ ID NO: 8086 - RNA, 21 nt, synthetic construct
  misc_feature 1..21: note = Synthetic
  source 1..21: mol_type = other RNA
gatatttcaggttgcactgat

SEQ ID NO: 8087 - RNA, 21 nt, synthetic construct
  misc_feature 1..21: note = Synthetic
  source 1..21: mol_type = other RNA
atatttcaggttgcactgata

SEQ ID NO: 8088 - RNA, 21 nt, synthetic construct
  misc_feature 1..21: note = Synthetic
  source 1..21: mol_type = other RNA
tatttcaggttgcactgatac

SEQ ID NO: 8089 - RNA, 21 nt, synthetic construct
  misc_feature 1..21: note = Synthetic
  source 1..21: mol_type = other RNA
atttcaggttgcactgataca

SEQ ID NO: 8090 - RNA, 21 nt, synthetic construct
  misc_feature 1..21: note = Synthetic
  source 1..21: mol_type = other RNA
tttcaggttgcactgatacat

SEQ ID NO: 8091 - RNA, 21 nt, synthetic construct
  misc_feature 1..21: note = Synthetic
  source 1..21: mol_type = other RNA
ttcaggttgcactgatacatt

SEQ ID NO: 8092 - RNA, 21 nt, synthetic construct
  misc_feature 1..21: note = Synthetic
  source 1..21: mol_type = other RNA
tcaggttgcactgatacattc

SEQ ID NO: 8093 - RNA, 21 nt, synthetic construct
  misc_feature 1..21: note = Synthetic
  source 1..21: mol_type = other RNA
caggttgcactgatacattct

SEQ ID NO: 8094 - RNA, 21 nt, synthetic construct
  misc_feature 1..21: note = Synthetic
  source 1..21: mol_type = other RNA
aggttgcactgatacattctt

SEQ ID NO: 8095 - RNA, 21 nt, synthetic construct
  misc_feature 1..21: note = Synthetic
  source 1..21: mol_type = other RNA
ggttgcactgatacattcttt

SEQ ID NO: 8096 - RNA, 21 nt, synthetic construct
  misc_feature 1..21: note = Synthetic
  source 1..21: mol_type = other RNA
gttgcactgatacattctttg

SEQ ID NO: 8097 - RNA, 21 nt, synthetic construct
  misc_feature 1..21: note = Synthetic
  source 1..21: mol_type = other RNA
ttgcactgatacattctttgg

SEQ ID NO: 8098 - RNA, 21 nt, synthetic construct
  misc_feature 1..21: note = Synthetic
  source 1..21: mol_type = other RNA
tgcactgatacattctttggc

SEQ ID NO: 8099 - RNA, 21 nt, synthetic construct
  misc_feature 1..21: note = Synthetic
  source 1..21: mol_type = other RNA
gcactgatacattctttggcc

SEQ ID NO: 8100 - RNA, 21 nt, synthetic construct
  misc_feature 1..21: note = Synthetic
  source 1..21: mol_type = other RNA
cactgatacattctttggccc

SEQ ID NO: 8101 - RNA, 21 nt, synthetic construct
  misc_feature 1..21: note = Synthetic
  source 1..21: mol_type = other RNA
actgatacattctttggccca

SEQ ID NO: 8102 - RNA, 21 nt, synthetic construct
  misc_feature 1..21: note = Synthetic
  source 1..21: mol_type = other RNA
ctgatacattctttggcccac

SEQ ID NO: 8103 - RNA, 21 nt, synthetic construct
  misc_feature 1..21: note = Synthetic
  source 1..21: mol_type = other RNA
tgatacattctttggcccacc

SEQ ID NO: 8104 - RNA, 21 nt, synthetic construct
  misc_feature 1..21: note = Synthetic
  source 1..21: mol_type = other RNA
gatacattctttggcccacca

SEQ ID NO: 8105 - RNA, 21 nt, synthetic construct
  misc_feature 1..21: note = Synthetic
  source 1..21: mol_type = other RNA
atacattctttggcccaccag

SEQ ID NO: 8106 - RNA, 21 nt, synthetic construct
  misc_feature 1..21: note = Synthetic
  source 1..21: mol_type = other RNA
tacattctttggcccaccaga

SEQ ID NO: 8107 - RNA, 21 nt, synthetic construct
  misc_feature 1..21: note = Synthetic
  source 1..21: mol_type = other RNA
acattctttggcccaccagac

SEQ ID NO: 8108 - RNA, 21 nt, synthetic construct
  misc_feature 1..21: note = Synthetic
  source 1..21: mol_type = other RNA
cattctttggcccaccagaca

SEQ ID NO: 8109 - RNA, 21 nt, synthetic construct
  misc_feature 1..21: note = Synthetic
  source 1..21: mol_type = other RNA
attctttggcccaccagacag

SEQ ID NO: 8110 - RNA, 21 nt, synthetic construct
  misc_feature 1..21: note = Synthetic
  source 1..21: mol_type = other RNA
ttctttggcccaccagacagc

SEQ ID NO: 8111 - RNA, 21 nt, synthetic construct
  misc_feature 1..21: note = Synthetic
  source 1..21: mol_type = other RNA
tctttggcccaccagacagct

SEQ ID NO: 8112 - RNA, 21 nt, synthetic construct
  misc_feature 1..21: note = Synthetic
  source 1..21: mol_type = other RNA
ctttggcccaccagacagctc

SEQ ID NO: 8113 - RNA, 21 nt, synthetic construct
  misc_feature 1..21: note = Synthetic
  source 1..21: mol_type = other RNA
tttggcccaccagacagctct

SEQ ID NO: 8114 - RNA, 21 nt, synthetic construct
  misc_feature 1..21: note = Synthetic
  source 1..21: mol_type = other RNA
ttggcccaccagacagctctg

SEQ ID NO: 8115 - RNA, 21 nt, synthetic construct
  misc_feature 1..21: note = Synthetic
  source 1..21: mol_type = other RNA
tggcccaccagacagctctgc

SEQ ID NO: 8116 - RNA, 21 nt, synthetic construct
  misc_feature 1..21: note = Synthetic
  source 1..21: mol_type = other RNA
ggcccaccagacagctctgca

SEQ ID NO: 8117 - RNA, 21 nt, synthetic construct
  misc_feature 1..21: note = Synthetic
  source 1..21: mol_type = other RNA
gcccaccagacagctctgcag

SEQ ID NO: 8118 - RNA, 21 nt, synthetic construct
  misc_feature 1..21: note = Synthetic
  source 1..21: mol_type = other RNA
cccaccagacagctctgcagt

SEQ ID NO: 8119 - RNA, 21 nt, synthetic construct
  misc_feature 1..21: note = Synthetic
  source 1..21: mol_type = other RNA
ccaccagacagctctgcagtc

SEQ ID NO: 8120 - RNA, 21 nt, synthetic construct
  misc_feature 1..21: note = Synthetic
  source 1..21: mol_type = other RNA
caccagacagctctgcagtca

SEQ ID NO: 8121 - RNA, 21 nt, synthetic construct
  misc_feature 1..21: note = Synthetic
  source 1..21: mol_type = other RNA
accagacagctctgcagtcag

SEQ ID NO: 8122 - RNA, 21 nt, synthetic construct
  misc_feature 1..21: note = Synthetic
  source 1..21: mol_type = other RNA
ccagacagctctgcagtcagg

SEQ ID NO: 8123 - RNA, 21 nt, synthetic construct
  misc_feature 1..21: note = Synthetic
  source 1..21: mol_type = other RNA
cagacagctctgcagtcaggt

SEQ ID NO: 8124 - RNA, 21 nt, synthetic construct
  misc_feature 1..21: note = Synthetic
  source 1..21: mol_type = other RNA
agacagctctgcagtcaggtc

SEQ ID NO: 8125 - RNA, 21 nt, synthetic construct
  misc_feature 1..21: note = Synthetic
  source 1..21: mol_type = other RNA
gacagctctgcagtcaggtct

SEQ ID NO: 8126 - RNA, 21 nt, synthetic construct
  misc_feature 1..21: note = Synthetic
  source 1..21: mol_type = other RNA
acagctctgcagtcaggtctg

SEQ ID NO: 8127 - RNA, 21 nt, synthetic construct
  misc_feature 1..21: note = Synthetic
  source 1..21: mol_type = other RNA
cagctctgcagtcaggtctgt

SEQ ID NO: 8128 - RNA, 21 nt, synthetic construct
  misc_feature 1..21: note = Synthetic
  source 1..21: mol_type = other RNA
agctctgcagtcaggtctgtg

SEQ ID NO: 8129 - RNA, 21 nt, synthetic construct
  misc_feature 1..21: note = Synthetic
  source 1..21: mol_type = other RNA
gctctgcagtcaggtctgtgg

SEQ ID NO: 8130 - RNA, 21 nt, synthetic construct
  misc_feature 1..21: note = Synthetic
  source 1..21: mol_type = other RNA
ctctgcagtcaggtctgtggt

SEQ ID NO: 8131 - RNA, 21 nt, synthetic construct
  misc_feature 1..21: note = Synthetic
  source 1..21: mol_type = other RNA
tctgcagtcaggtctgtggtt

SEQ ID NO: 8132 - RNA, 21 nt, synthetic construct
  misc_feature 1..21: note = Synthetic
  source 1..21: mol_type = other RNA
ctgcagtcaggtctgtggtta

SEQ ID NO: 8133 - RNA, 21 nt, synthetic construct
  misc_feature 1..21: note = Synthetic
  source 1..21: mol_type = other RNA
tgcagtcaggtctgtggttag

SEQ ID NO: 8134 - RNA, 21 nt, synthetic construct
  misc_feature 1..21: note = Synthetic
  source 1..21: mol_type = other RNA
gcagtcaggtctgtggttagg

SEQ ID NO: 8135 - RNA, 21 nt, synthetic construct
  misc_feature 1..21: note = Synthetic
  source 1..21: mol_type = other RNA
cagtcaggtctgtggttaggg

SEQ ID NO: 8136 - RNA, 21 nt, synthetic construct
  misc_feature 1..21: note = Synthetic
  source 1..21: mol_type = other RNA
agtcaggtctgtggttagggg

SEQ ID NO: 8137 - RNA, 21 nt, synthetic construct
  misc_feature 1..21: note = Synthetic
  source 1..21: mol_type = other RNA
gtcaggtctgtggttagggga

SEQ ID NO: 8138 - RNA, 21 nt, synthetic construct
  misc_feature 1..21: note = Synthetic
  source 1..21: mol_type = other RNA
tcaggtctgtggttaggggac

SEQ ID NO: 8139 - RNA, 21 nt, synthetic construct
  misc_feature 1..21: note = Synthetic
  source 1..21: mol_type = other RNA
caggtctgtggttaggggact

SEQ ID NO: 8140 - RNA, 21 nt, synthetic construct
  misc_feature 1..21: note = Synthetic
  source 1..21: mol_type = other RNA
aggtctgtggttaggggactg

SEQ ID NO: 8141 - RNA, 21 nt, synthetic construct
  misc_feature 1..21: note = Synthetic
  source 1..21: mol_type = other RNA
ggtctgtggttaggggactgg

SEQ ID NO: 8142 - RNA, 21 nt, synthetic construct
  misc_feature 1..21: note = Synthetic
  source 1..21: mol_type = other RNA
gtctgtggttaggggactgga

SEQ ID NO: 8143 - RNA, 21 nt, synthetic construct
  misc_feature 1..21: note = Synthetic
  source 1..21: mol_type = other RNA
tctgtggttaggggactggaa

SEQ ID NO: 8144 - RNA, 21 nt, synthetic construct
  misc_feature 1..21: note = Synthetic
  source 1..21: mol_type = other RNA
ctgtggttaggggactggaaa

SEQ ID NO: 8145 - RNA, 21 nt, synthetic construct
  misc_feature 1..21: note = Synthetic
  source 1..21: mol_type = other RNA
tgtggttaggggactggaaat

SEQ ID NO: 8146 - RNA, 21 nt, synthetic construct
  misc_feature 1..21: note = Synthetic
  source 1..21: mol_type = other RNA
gtggttaggggactggaaatt

SEQ ID NO: 8147 - RNA, 21 nt, synthetic construct
  misc_feature 1..21: note = Synthetic
  source 1..21: mol_type = other RNA
tggttaggggactggaaattg

SEQ ID NO: 8148 - RNA, 21 nt, synthetic construct
  misc_feature 1..21: note = Synthetic
  source 1..21: mol_type = other RNA
ggttaggggactggaaattgt

SEQ ID NO: 8149 - RNA, 21 nt, synthetic construct
  misc_feature 1..21: note = Synthetic
  source 1..21: mol_type = other RNA
gttaggggactggaaattgta

SEQ ID NO: 8150 - RNA, 21 nt, synthetic construct
  misc_feature 1..21: note = Synthetic
  source 1..21: mol_type = other RNA
ttaggggactggaaattgtaa

SEQ ID NO: 8151 - RNA, 21 nt, synthetic construct
  misc_feature 1..21: note = Synthetic
  source 1..21: mol_type = other RNA
taggggactggaaattgtaat

SEQ ID NO: 8152 - RNA, 21 nt, synthetic construct
  misc_feature 1..21: note = Synthetic
  source 1..21: mol_type = other RNA
aggggactggaaattgtaatc

SEQ ID NO: 8153 - RNA, 21 nt, synthetic construct
  misc_feature 1..21: note = Synthetic
  source 1..21: mol_type = other RNA
ggggactggaaattgtaatcg

SEQ ID NO: 8154 - RNA, 21 nt, synthetic construct
  misc_feature 1..21: note = Synthetic
  source 1..21: mol_type = other RNA
gggactggaaattgtaatcgc

SEQ ID NO: 8155 - RNA, 21 nt, synthetic construct
  misc_feature 1..21: note = Synthetic
  source 1..21: mol_type = other RNA
ggactggaaattgtaatcgcc

SEQ ID NO: 8156 - RNA, 21 nt, synthetic construct
  misc_feature 1..21: note = Synthetic
  source 1..21: mol_type = other RNA
gactggaaattgtaatcgcct

SEQ ID NO: 8157 - RNA, 21 nt, synthetic construct
  misc_feature 1..21: note = Synthetic
  source 1..21: mol_type = other RNA
actggaaattgtaatcgcctt

SEQ ID NO: 8158 - RNA, 21 nt, synthetic construct
  misc_feature 1..21: note = Synthetic
  source 1..21: mol_type = other RNA
ctggaaattgtaatcgccttg

SEQ ID NO: 8159 - RNA, 21 nt, synthetic construct
  misc_feature 1..21: note = Synthetic
  source 1..21: mol_type = other RNA
tggaaattgtaatcgccttgt

SEQ ID NO: 8160 - RNA, 21 nt, synthetic construct
  misc_feature 1..21: note = Synthetic
  source 1..21: mol_type = other RNA
ggaaattgtaatcgccttgtg

SEQ ID NO: 8161 - RNA, 21 nt, synthetic construct
  misc_feature 1..21: note = Synthetic
  source 1..21: mol_type = other RNA
gaaattgtaatcgccttgtgg

SEQ ID NO: 8162 - RNA, 21 nt, synthetic construct
  misc_feature 1..21: note = Synthetic
  source 1..21: mol_type = other RNA
aaattgtaatcgccttgtgga

SEQ ID NO: 8163 - RNA, 21 nt, synthetic construct
  misc_feature 1..21: note = Synthetic
  source 1..21: mol_type = other RNA
aattgtaatcgccttgtggac

SEQ ID NO: 8164 - RNA, 21 nt, synthetic construct
  misc_feature 1..21: note = Synthetic
  source 1..21: mol_type = other RNA
attgtaatcgccttgtggacc

SEQ ID NO: 8165 - RNA, 21 nt, synthetic construct
  misc_feature 1..21: note = Synthetic
  source 1..21: mol_type = other RNA
ttgtaatcgccttgtggacct

SEQ ID NO: 8166 - RNA, 21 nt, synthetic construct
  misc_feature 1..21: note = Synthetic
  source 1..21: mol_type = other RNA
tgtaatcgccttgtggacctc

SEQ ID NO: 8167 - RNA, 21 nt, synthetic construct
  misc_feature 1..21: note = Synthetic
  source 1..21: mol_type = other RNA
gtaatcgccttgtggacctct

SEQ ID NO: 8168 - RNA, 21 nt, synthetic construct
  misc_feature 1..21: note = Synthetic
  source 1..21: mol_type = other RNA
taatcgccttgtggacctctg

SEQ ID NO: 8169 - RNA, 21 nt, synthetic construct
  misc_feature 1..21: note = Synthetic
  source 1..21: mol_type = other RNA
aatcgccttgtggacctctgc

SEQ ID NO: 8170 - RNA, 21 nt, synthetic construct
  misc_feature 1..21: note = Synthetic
  source 1..21: mol_type = other RNA
atcgccttgtggacctctgca

SEQ ID NO: 8171 - RNA, 21 nt, synthetic construct
  misc_feature 1..21: note = Synthetic
  source 1..21: mol_type = other RNA
tcgccttgtggacctctgcag

SEQ ID NO: 8172 - RNA, 21 nt, synthetic construct
  misc_feature 1..21: note = Synthetic
  source 1..21: mol_type = other RNA
cgccttgtggacctctgcaga

SEQ ID NO: 8173 - RNA, 21 nt, synthetic construct
  misc_feature 1..21: note = Synthetic
  source 1..21: mol_type = other RNA
gccttgtggacctctgcagag

SEQ ID NO: 8174 - RNA, 21 nt, synthetic construct
  misc_feature 1..21: note = Synthetic
  source 1..21: mol_type = other RNA
ccttgtggacctctgcagagc

SEQ ID NO: 8175 - RNA, 21 nt, synthetic construct
  misc_feature 1..21: note = Synthetic
  source 1..21: mol_type = other RNA
cttgtggacctctgcagagcc

SEQ ID NO: 8176 - RNA, 21 nt, synthetic construct
  misc_feature 1..21: note = Synthetic
  source 1..21: mol_type = other RNA
ttgtggacctctgcagagcca

SEQ ID NO: 8177 - RNA, 21 nt, synthetic construct
  misc_feature 1..21: note = Synthetic
  source 1..21: mol_type = other RNA
tgtggacctctgcagagccac

SEQ ID NO: 8178 - RNA, 21 nt, synthetic construct
  misc_feature 1..21: note = Synthetic
  source 1..21: mol_type = other RNA
gtggacctctgcagagccact

SEQ ID NO: 8179 - RNA, 21 nt, synthetic construct
  misc_feature 1..21: note = Synthetic
  source 1..21: mol_type = other RNA
tggacctctgcagagccactg

SEQ ID NO: 8180 - RNA, 21 nt, synthetic construct
  misc_feature 1..21: note = Synthetic
  source 1..21: mol_type = other RNA
ggacctctgcagagccactgg

SEQ ID NO: 8181 - RNA, 21 nt, synthetic construct
  misc_feature 1..21: note = Synthetic
  source 1..21: mol_type = other RNA
gacctctgcagagccactggt

SEQ ID NO: 8182 - RNA, 21 nt, synthetic construct
  misc_feature 1..21: note = Synthetic
  source 1..21: mol_type = other RNA
acctctgcagagccactggta

SEQ ID NO: 8183 - RNA, 21 nt, synthetic construct
  misc_feature 1..21: note = Synthetic
  source 1..21: mol_type = other RNA
cctctgcagagccactggtag

SEQ ID NO: 8184 - RNA, 21 nt, synthetic construct
  misc_feature 1..21: note = Synthetic
  source 1..21: mol_type = other RNA
ctctgcagagccactggtagt

SEQ ID NO: 8185 - RNA, 21 nt, synthetic construct
  misc_feature 1..21: note = Synthetic
  source 1..21: mol_type = other RNA
tctgcagagccactggtagtc

SEQ ID NO: 8186 - RNA, 21 nt, synthetic construct
  misc_feature 1..21: note = Synthetic
  source 1..21: mol_type = other RNA
ctgcagagccactggtagtca

SEQ ID NO: 8187 - RNA, 21 nt, synthetic construct
  misc_feature 1..21: note = Synthetic
  source 1..21: mol_type = other RNA
tgcagagccactggtagtcag

SEQ ID NO: 8188 - RNA, 21 nt, synthetic construct
  misc_feature 1..21: note = Synthetic
  source 1..21: mol_type = other RNA
gcagagccactggtagtcaga

SEQ ID NO: 8189 - RNA, 21 nt, synthetic construct
  misc_feature 1..21: note = Synthetic
  source 1..21: mol_type = other RNA
cagagccactggtagtcagac

SEQ ID NO: 8190 - RNA, 21 nt, synthetic construct
  misc_feature 1..21: note = Synthetic
  source 1..21: mol_type = other RNA
agagccactggtagtcagacc

SEQ ID NO: 8191 - RNA, 21 nt, synthetic construct
  misc_feature 1..21: note = Synthetic
  source 1..21: mol_type = other RNA
gagccactggtagtcagacca

SEQ ID NO: 8192 - RNA, 21 nt, synthetic construct
  misc_feature 1..21: note = Synthetic
  source 1..21: mol_type = other RNA
agccactggtagtcagaccac

SEQ ID NO: 8193 - RNA, 21 nt, synthetic construct
  misc_feature 1..21: note = Synthetic
  source 1..21: mol_type = other RNA
gccactggtagtcagaccacc

SEQ ID NO: 8194 - RNA, 21 nt, synthetic construct
  misc_feature 1..21: note = Synthetic
  source 1..21: mol_type = other RNA
ccactggtagtcagaccacct

SEQ ID NO: 8195 - RNA, 21 nt, synthetic construct
  misc_feature 1..21: note = Synthetic
  source 1..21: mol_type = other RNA
cactggtagtcagaccaccta

SEQ ID NO: 8196 - RNA, 21 nt, synthetic construct
  misc_feature 1..21: note = Synthetic
  source 1..21: mol_type = other RNA
actggtagtcagaccacctaa

SEQ ID NO: 8197 - RNA, 21 nt, synthetic construct
  misc_feature 1..21: note = Synthetic
  source 1..21: mol_type = other RNA
ctggtagtcagaccacctaat

SEQ ID NO: 8198 - RNA, 21 nt, synthetic construct
  misc_feature 1..21: note = Synthetic
  source 1..21: mol_type = other RNA
tggtagtcagaccacctaatt

SEQ ID NO: 8199 - RNA, 21 nt, synthetic construct
  misc_feature 1..21: note = Synthetic
  source 1..21: mol_type = other RNA
ggtagtcagaccacctaattc

SEQ ID NO: 8200 - RNA, 21 nt, synthetic construct
  misc_feature 1..21: note = Synthetic
  source 1..21: mol_type = other RNA
gtagtcagaccacctaattcg

SEQ ID NO: 8201 - RNA, 21 nt, synthetic construct
  misc_feature 1..21: note = Synthetic
  source 1..21: mol_type = other RNA
tagtcagaccacctaattcgt

SEQ ID NO: 8202 - RNA, 21 nt, synthetic construct
  misc_feature 1..21: note = Synthetic
  source 1..21: mol_type = other RNA
agtcagaccacctaattcgtt

SEQ ID NO: 8203 - RNA, 21 nt, synthetic construct
  misc_feature 1..21: note = Synthetic
  source 1..21: mol_type = other RNA
gtcagaccacctaattcgttg

SEQ ID NO: 8204 - RNA, 21 nt, synthetic construct
  misc_feature 1..21: note = Synthetic
  source 1..21: mol_type = other RNA
tcagaccacctaattcgttgg

SEQ ID NO: 8205 - RNA, 21 nt, synthetic construct
  misc_feature 1..21: note = Synthetic
  source 1..21: mol_type = other RNA
cagaccacctaattcgttgga

SEQ ID NO: 8206 - RNA, 21 nt, synthetic construct
  misc_feature 1..21: note = Synthetic
  source 1..21: mol_type = other RNA
agaccacctaattcgttggag

SEQ ID NO: 8207 - RNA, 21 nt, synthetic construct
  misc_feature 1..21: note = Synthetic
  source 1..21: mol_type = other RNA
gaccacctaattcgttggagt

SEQ ID NO: 8208 - RNA, 21 nt, synthetic construct
  misc_feature 1..21: note = Synthetic
  source 1..21: mol_type = other RNA
accacctaattcgttggagtc

SEQ ID NO: 8209 - RNA, 21 nt, synthetic construct
  misc_feature 1..21: note = Synthetic
  source 1..21: mol_type = other RNA
ccacctaattcgttggagtca

SEQ ID NO: 8210 - RNA, 21 nt, synthetic construct
  misc_feature 1..21: note = Synthetic
  source 1..21: mol_type = other RNA
cacctaattcgttggagtcat

SEQ ID NO: 8211 - RNA, 21 nt, synthetic construct
  misc_feature 1..21: note = Synthetic
  source 1..21: mol_type = other RNA
acctaattcgttggagtcatt

SEQ ID NO: 8212 - RNA, 21 nt, synthetic construct
  misc_feature 1..21: note = Synthetic
  source 1..21: mol_type = other RNA
cctaattcgttggagtcattc

SEQ ID NO: 8213 - RNA, 21 nt, synthetic construct
  misc_feature 1..21: note = Synthetic
  source 1..21: mol_type = other RNA
ctaattcgttggagtcattca

SEQ ID NO: 8214 - RNA, 21 nt, synthetic construct
  misc_feature 1..21: note = Synthetic
  source 1..21: mol_type = other RNA
taattcgttggagtcattcac

SEQ ID NO: 8215 - RNA, 21 nt, synthetic construct
  misc_feature 1..21: note = Synthetic
  source 1..21: mol_type = other RNA
aattcgttggagtcattcact

SEQ ID NO: 8216 - RNA, 21 nt, synthetic construct
  misc_feature 1..21: note = Synthetic
  source 1..21: mol_type = other RNA
attcgttggagtcattcactt

SEQ ID NO: 8217 - RNA, 21 nt, synthetic construct
  misc_feature 1..21: note = Synthetic
  source 1..21: mol_type = other RNA
ttcgttggagtcattcacttt

SEQ ID NO: 8218 - RNA, 21 nt, synthetic construct
  misc_feature 1..21: note = Synthetic
  source 1..21: mol_type = other RNA
tcgttggagtcattcacttta

SEQ ID NO: 8219 - RNA, 21 nt, synthetic construct
  misc_feature 1..21: note = Synthetic
  source 1..21: mol_type = other RNA
cgttggagtcattcactttag

SEQ ID NO: 8220 - RNA, 21 nt, synthetic construct
  misc_feature 1..21: note = Synthetic
  source 1..21: mol_type = other RNA
gttggagtcattcactttaga

SEQ ID NO: 8221 - RNA, 21 nt, synthetic construct
  misc_feature 1..21: note = Synthetic
  source 1..21: mol_type = other RNA
ttggagtcattcactttagaa

SEQ ID NO: 8222 - RNA, 21 nt, synthetic construct
  misc_feature 1..21: note = Synthetic
  source 1..21: mol_type = other RNA
tggagtcattcactttagaat

SEQ ID NO: 8223 - RNA, 21 nt, synthetic construct
  misc_feature 1..21: note = Synthetic
  source 1..21: mol_type = other RNA
ggagtcattcactttagaatg

SEQ ID NO: 8224 - RNA, 21 nt, synthetic construct
  misc_feature 1..21: note = Synthetic
  source 1..21: mol_type = other RNA
gagtcattcactttagaatgc

SEQ ID NO: 8225 - RNA, 21 nt, synthetic construct
  misc_feature 1..21: note = Synthetic
  source 1..21: mol_type = other RNA
agtcattcactttagaatgct

SEQ ID NO: 8226 - RNA, 21 nt, synthetic construct
  misc_feature 1..21: note = Synthetic
  source 1..21: mol_type = other RNA
gtcattcactttagaatgctg

SEQ ID NO: 8227 - RNA, 21 nt, synthetic construct
  misc_feature 1..21: note = Synthetic
  source 1..21: mol_type = other RNA
tcattcactttagaatgctgt

SEQ ID NO: 8228 - RNA, 21 nt, synthetic construct
  misc_feature 1..21: note = Synthetic
  source 1..21: mol_type = other RNA
cattcactttagaatgctgtg

SEQ ID NO: 8229 - RNA, 21 nt, synthetic construct
  misc_feature 1..21: note = Synthetic
  source 1..21: mol_type = other RNA
attcactttagaatgctgtgt

SEQ ID NO: 8230 - RNA, 21 nt, synthetic construct
  misc_feature 1..21: note = Synthetic
  source 1..21: mol_type = other RNA
ttcactttagaatgctgtgtc

SEQ ID NO: 8231 - RNA, 21 nt, synthetic construct
  misc_feature 1..21: note = Synthetic
  source 1..21: mol_type = other RNA
tcactttagaatgctgtgtca

SEQ ID NO: 8232 - RNA, 21 nt, synthetic construct
  misc_feature 1..21: note = Synthetic
  source 1..21: mol_type = other RNA
cactttagaatgctgtgtcac

SEQ ID NO: 8233 - RNA, 21 nt, synthetic construct
  misc_feature 1..21: note = Synthetic
  source 1..21: mol_type = other RNA
actttagaatgctgtgtcact

SEQ ID NO: 8234 - RNA, 21 nt, synthetic construct
  misc_feature 1..21: note = Synthetic
  source 1..21: mol_type = other RNA
ctttagaatgctgtgtcacta

SEQ ID NO: 8235 - RNA, 21 nt, synthetic construct
  misc_feature 1..21: note = Synthetic
  source 1..21: mol_type = other RNA
tttagaatgctgtgtcactat

SEQ ID NO: 8236 - RNA, 21 nt, synthetic construct
  misc_feature 1..21: note = Synthetic
  source 1..21: mol_type = other RNA
ttagaatgctgtgtcactata

SEQ ID NO: 8237 - RNA, 21 nt, synthetic construct
  misc_feature 1..21: note = Synthetic
  source 1..21: mol_type = other RNA
tagaatgctgtgtcactatag

SEQ ID NO: 8238 - RNA, 21 nt, synthetic construct
  misc_feature 1..21: note = Synthetic
  source 1..21: mol_type = other RNA
agaatgctgtgtcactatagg

SEQ ID NO: 8239 - RNA, 21 nt, synthetic construct
  misc_feature 1..21: note = Synthetic
  source 1..21: mol_type = other RNA
gaatgctgtgtcactataggt

SEQ ID NO: 8240 - RNA, 21 nt, synthetic construct
  misc_feature 1..21: note = Synthetic
  source 1..21: mol_type = other RNA
aatgctgtgtcactataggtg

SEQ ID NO: 8241 - RNA, 21 nt, synthetic construct
  misc_feature 1..21: note = Synthetic
  source 1..21: mol_type = other RNA
atgctgtgtcactataggtgt

SEQ ID NO: 8242 - RNA, 21 nt, synthetic construct
  misc_feature 1..21: note = Synthetic
  source 1..21: mol_type = other RNA
tgctgtgtcactataggtgta

SEQ ID NO: 8243 - RNA, 21 nt, synthetic construct
  misc_feature 1..21: note = Synthetic
  source 1..21: mol_type = other RNA
gctgtgtcactataggtgtaa

SEQ ID NO: 8244 - RNA, 21 nt, synthetic construct
  misc_feature 1..21: note = Synthetic
  source 1..21: mol_type = other RNA
ctgtgtcactataggtgtaac

SEQ ID NO: 8245 - RNA, 21 nt, synthetic construct
  misc_feature 1..21: note = Synthetic
  source 1..21: mol_type = other RNA
tgtgtcactataggtgtaact

SEQ ID NO: 8246 - RNA, 21 nt, synthetic construct
  misc_feature 1..21: note = Synthetic
  source 1..21: mol_type = other RNA
gtgtcactataggtgtaacta

SEQ ID NO: 8247 - RNA, 21 nt, synthetic construct
  misc_feature 1..21: note = Synthetic
  source 1..21: mol_type = other RNA
tgtcactataggtgtaactac

SEQ ID NO: 8248 - RNA, 21 nt, synthetic construct
  misc_feature 1..21: note = Synthetic
  source 1..21: mol_type = other RNA
gtcactataggtgtaactacg

SEQ ID NO: 8249 - RNA, 21 nt, synthetic construct
  misc_feature 1..21: note = Synthetic
  source 1..21: mol_type = other RNA
tcactataggtgtaactacgt

SEQ ID NO: 8250 - RNA, 21 nt, synthetic construct
  misc_feature 1..21: note = Synthetic
  source 1..21: mol_type = other RNA
cactataggtgtaactacgtc

SEQ ID NO: 8251 - RNA, 21 nt, synthetic construct
  misc_feature 1..21: note = Synthetic
  source 1..21: mol_type = other RNA
actataggtgtaactacgtca

SEQ ID NO: 8252 - RNA, 21 nt, synthetic construct
  misc_feature 1..21: note = Synthetic
  source 1..21: mol_type = other RNA
ctataggtgtaactacgtcac

SEQ ID NO: 8253 - RNA, 21 nt, synthetic construct
  misc_feature 1..21: note = Synthetic
  source 1..21: mol_type = other RNA
tataggtgtaactacgtcact

SEQ ID NO: 8254 - RNA, 21 nt, synthetic construct
  misc_feature 1..21: note = Synthetic
  source 1..21: mol_type = other RNA
ataggtgtaactacgtcactg

SEQ ID NO: 8255 - RNA, 21 nt, synthetic construct
  misc_feature 1..21: note = Synthetic
  source 1..21: mol_type = other RNA
taggtgtaactacgtcactgg

SEQ ID NO: 8256 - RNA, 21 nt, synthetic construct
  misc_feature 1..21: note = Synthetic
  source 1..21: mol_type = other RNA
aggtgtaactacgtcactggg

SEQ ID NO: 8257 - RNA, 21 nt, synthetic construct
  misc_feature 1..21: note = Synthetic
  source 1..21: mol_type = other RNA
ggtgtaactacgtcactggga

SEQ ID NO: 8258 - RNA, 21 nt, synthetic construct
  misc_feature 1..21: note = Synthetic
  source 1..21: mol_type = other RNA
gtgtaactacgtcactgggac

SEQ ID NO: 8259 - RNA, 21 nt, synthetic construct
  misc_feature 1..21: note = Synthetic
  source 1..21: mol_type = other RNA
tgtaactacgtcactgggact

SEQ ID NO: 8260 - RNA, 21 nt, synthetic construct
  misc_feature 1..21: note = Synthetic
  source 1..21: mol_type = other RNA
gtaactacgtcactgggacta

SEQ ID NO: 8261 - RNA, 21 nt, synthetic construct
  misc_feature 1..21: note = Synthetic
  source 1..21: mol_type = other RNA
taactacgtcactgggactac

SEQ ID NO: 8262 - RNA, 21 nt, synthetic construct
  misc_feature 1..21: note = Synthetic
  source 1..21: mol_type = other RNA
aactacgtcactgggactacc

SEQ ID NO: 8263 - RNA, 21 nt, synthetic construct
  misc_feature 1..21: note = Synthetic
  source 1..21: mol_type = other RNA
actacgtcactgggactacct

SEQ ID NO: 8264 - RNA, 21 nt, synthetic construct
  misc_feature 1..21: note = Synthetic
  source 1..21: mol_type = other RNA
ctacgtcactgggactacctc

SEQ ID NO: 8265 - RNA, 21 nt, synthetic construct
  misc_feature 1..21: note = Synthetic
  source 1..21: mol_type = other RNA
tacgtcactgggactacctct

SEQ ID NO: 8266 - RNA, 21 nt, synthetic construct
  misc_feature 1..21: note = Synthetic
  source 1..21: mol_type = other RNA
acgtcactgggactacctctc

SEQ ID NO: 8267 - RNA, 21 nt, synthetic construct
  misc_feature 1..21: note = Synthetic
  source 1..21: mol_type = other RNA
cgtcactgggactacctctct

SEQ ID NO: 8268 - RNA, 21 nt, synthetic construct
  misc_feature 1..21: note = Synthetic
  source 1..21: mol_type = other RNA
gtcactgggactacctctctt

SEQ ID NO: 8269 - RNA, 21 nt, synthetic construct
  misc_feature 1..21: note = Synthetic
  source 1..21: mol_type = other RNA
tcactgggactacctctcttc

SEQ ID NO: 8270 - RNA, 21 nt, synthetic construct
  misc_feature 1..21: note = Synthetic
  source 1..21: mol_type = other RNA
cactgggactacctctcttct

SEQ ID NO: 8271 - RNA, 21 nt, synthetic construct
  misc_feature 1..21: note = Synthetic
  source 1..21: mol_type = other RNA
actgggactacctctcttctg

SEQ ID NO: 8272 - RNA, 21 nt, synthetic construct
  misc_feature 1..21: note = Synthetic
  source 1..21: mol_type = other RNA
ctgggactacctctcttctga

SEQ ID NO: 8273 - RNA, 21 nt, synthetic construct
  misc_feature 1..21: note = Synthetic
  source 1..21: mol_type = other RNA
tgggactacctctcttctgaa

SEQ ID NO: 8274 - RNA, 21 nt, synthetic construct
  misc_feature 1..21: note = Synthetic
  source 1..21: mol_type = other RNA
gggactacctctcttctgaag

SEQ ID NO: 8275 - RNA, 21 nt, synthetic construct
  misc_feature 1..21: note = Synthetic
  source 1..21: mol_type = other RNA
ggactacctctcttctgaagc

SEQ ID NO: 8276 - RNA, 21 nt, synthetic construct
  misc_feature 1..21: note = Synthetic
  source 1..21: mol_type = other RNA
gactacctctcttctgaagct

SEQ ID NO: 8277 - RNA, 21 nt, synthetic construct
  misc_feature 1..21: note = Synthetic
  source 1..21: mol_type = other RNA
actacctctcttctgaagctt

SEQ ID NO: 8278 - RNA, 21 nt, synthetic construct
  misc_feature 1..21: note = Synthetic
  source 1..21: mol_type = other RNA
ctacctctcttctgaagcttc

SEQ ID NO: 8279 - RNA, 21 nt, synthetic construct
  misc_feature 1..21: note = Synthetic
  source 1..21: mol_type = other RNA
tacctctcttctgaagcttcc

SEQ ID NO: 8280 - RNA, 21 nt, synthetic construct
  misc_feature 1..21: note = Synthetic
  source 1..21: mol_type = other RNA
acctctcttctgaagcttcct

SEQ ID NO: 8281 - RNA, 21 nt, synthetic construct
  misc_feature 1..21: note = Synthetic
  source 1..21: mol_type = other RNA
cctctcttctgaagcttcctg

SEQ ID NO: 8282 - RNA, 21 nt, synthetic construct
  misc_feature 1..21: note = Synthetic
  source 1..21: mol_type = other RNA
ctctcttctgaagcttcctga

SEQ ID NO: 8283 - RNA, 21 nt, synthetic construct
  misc_feature 1..21: note = Synthetic
  source 1..21: mol_type = other RNA
tctcttctgaagcttcctgat

SEQ ID NO: 8284 - RNA, 21 nt, synthetic construct
  misc_feature 1..21: note = Synthetic
  source 1..21: mol_type = other RNA
ctcttctgaagcttcctgatt

SEQ ID NO: 8285 - RNA, 21 nt, synthetic construct
  misc_feature 1..21: note = Synthetic
  source 1..21: mol_type = other RNA
tcttctgaagcttcctgatta

SEQ ID NO: 8286 - RNA, 21 nt, synthetic construct
  misc_feature 1..21: note = Synthetic
  source 1..21: mol_type = other RNA
cttctgaagcttcctgattaa

SEQ ID NO: 8287 - RNA, 21 nt, synthetic construct
  misc_feature 1..21: note = Synthetic
  source 1..21: mol_type = other RNA
ttctgaagcttcctgattaag

SEQ ID NO: 8288 - RNA, 21 nt, synthetic construct
  misc_feature 1..21: note = Synthetic
  source 1..21: mol_type = other RNA
tctgaagcttcctgattaagc

SEQ ID NO: 8289 - RNA, 21 nt, synthetic construct
  misc_feature 1..21: note = Synthetic
  source 1..21: mol_type = other RNA
ctgaagcttcctgattaagct

SEQ ID NO: 8290 - RNA, 21 nt, synthetic construct
  misc_feature 1..21: note = Synthetic
  source 1..21: mol_type = other RNA
tgaagcttcctgattaagctc

SEQ ID NO: 8291 - RNA, 21 nt, synthetic construct
  misc_feature 1..21: note = Synthetic
  source 1..21: mol_type = other RNA
gaagcttcctgattaagctct

SEQ ID NO: 8292 - RNA, 21 nt, synthetic construct
  misc_feature 1..21: note = Synthetic
  source 1..21: mol_type = other RNA
aagcttcctgattaagctctg

SEQ ID NO: 8293 - RNA, 21 nt, synthetic construct
  misc_feature 1..21: note = Synthetic
  source 1..21: mol_type = other RNA
agcttcctgattaagctctgc

SEQ ID NO: 8294 - RNA, 21 nt, synthetic construct
  misc_feature 1..21: note = Synthetic
  source 1..21: mol_type = other RNA
gcttcctgattaagctctgct

SEQ ID NO: 8295 - RNA, 21 nt, synthetic construct
  misc_feature 1..21: note = Synthetic
  source 1..21: mol_type = other RNA
cttcctgattaagctctgctg

SEQ ID NO: 8296 - RNA, 21 nt, synthetic construct
  misc_feature 1..21: note = Synthetic
  source 1..21: mol_type = other RNA
ttcctgattaagctctgctgg

SEQ ID NO: 8297 - RNA, 21 nt, synthetic construct
  misc_feature 1..21: note = Synthetic
  source 1..21: mol_type = other RNA
tcctgattaagctctgctggt

SEQ ID NO: 8298 - RNA, 21 nt, synthetic construct
  misc_feature 1..21: note = Synthetic
  source 1..21: mol_type = other RNA
cctgattaagctctgctggtc

SEQ ID NO: 8299 - RNA, 21 nt, synthetic construct
  misc_feature 1..21: note = Synthetic
  source 1..21: mol_type = other RNA
ctgattaagctctgctggtca

SEQ ID NO: 8300 - RNA, 21 nt, synthetic construct
  misc_feature 1..21: note = Synthetic
  source 1..21: mol_type = other RNA
tgattaagctctgctggtcac

SEQ ID NO: 8301 - RNA, 21 nt, synthetic construct
  misc_feature 1..21: note = Synthetic
  source 1..21: mol_type = other RNA
gattaagctctgctggtcact

SEQ ID NO: 8302 - RNA, 21 nt, synthetic construct
  misc_feature 1..21: note = Synthetic
  source 1..21: mol_type = other RNA
attaagctctgctggtcactg

SEQ ID NO: 8303 - RNA, 21 nt, synthetic construct
  misc_feature 1..21: note = Synthetic
  source 1..21: mol_type = other RNA
ttaagctctgctggtcactgg

SEQ ID NO: 8304 - RNA, 21 nt, synthetic construct
  misc_feature 1..21: note = Synthetic
  source 1..21: mol_type = other RNA
taagctctgctggtcactgga

SEQ ID NO: 8305 - RNA, 21 nt, synthetic construct
  misc_feature 1..21: note = Synthetic
  source 1..21: mol_type = other RNA
aagctctgctggtcactggaa

SEQ ID NO: 8306 - RNA, 21 nt, synthetic construct
  misc_feature 1..21: note = Synthetic
  source 1..21: mol_type = other RNA
agctctgctggtcactggaag

SEQ ID NO: 8307 - RNA, 21 nt, synthetic construct
  misc_feature 1..21: note = Synthetic
  source 1..21: mol_type = other RNA
gctctgctggtcactggaaga

SEQ ID NO: 8308 - RNA, 21 nt, synthetic construct
  misc_feature 1..21: note = Synthetic
  source 1..21: mol_type = other RNA
ctctgctggtcactggaagat

SEQ ID NO: 8309 - RNA, 21 nt, synthetic construct
  misc_feature 1..21: note = Synthetic
  source 1..21: mol_type = other RNA
tctgctggtcactggaagata

SEQ ID NO: 8310 - RNA, 21 nt, synthetic construct
  misc_feature 1..21: note = Synthetic
  source 1..21: mol_type = other RNA
ctgctggtcactggaagatac

SEQ ID NO: 8311 - RNA, 21 nt, synthetic construct
  misc_feature 1..21: note = Synthetic
  source 1..21: mol_type = other RNA
tgctggtcactggaagataca

SEQ ID NO: 8312 - RNA, 21 nt, synthetic construct
  misc_feature 1..21: note = Synthetic
  source 1..21: mol_type = other RNA
gctggtcactggaagatacag

SEQ ID NO: 8313 - RNA, 21 nt, synthetic construct
  misc_feature 1..21: note = Synthetic
  source 1..21: mol_type = other RNA
ctggtcactggaagatacagc

SEQ ID NO: 8314 - RNA, 21 nt, synthetic construct
  misc_feature 1..21: note = Synthetic
  source 1..21: mol_type = other RNA
tggtcactggaagatacagca

SEQ ID NO: 8315 - RNA, 21 nt, synthetic construct
  misc_feature 1..21: note = Synthetic
  source 1..21: mol_type = other RNA
ggtcactggaagatacagcag

SEQ ID NO: 8316 - RNA, 21 nt, synthetic construct
  misc_feature 1..21: note = Synthetic
  source 1..21: mol_type = other RNA
gtcactggaagatacagcagg

SEQ ID NO: 8317 - RNA, 21 nt, synthetic construct
  misc_feature 1..21: note = Synthetic
  source 1..21: mol_type = other RNA
tcactggaagatacagcaggt

SEQ ID NO: 8318 - RNA, 21 nt, synthetic construct
  misc_feature 1..21: note = Synthetic
  source 1..21: mol_type = other RNA
cactggaagatacagcaggtc

SEQ ID NO: 8319 - RNA, 21 nt, synthetic construct
  misc_feature 1..21: note = Synthetic
  source 1..21: mol_type = other RNA
actggaagatacagcaggtct

SEQ ID NO: 8320 - RNA, 21 nt, synthetic construct
  misc_feature 1..21: note = Synthetic
  source 1..21: mol_type = other RNA
ctggaagatacagcaggtctg

SEQ ID NO: 8321 - RNA, 21 nt, synthetic construct
  misc_feature 1..21: note = Synthetic
  source 1..21: mol_type = other RNA
tggaagatacagcaggtctga

SEQ ID NO: 8322 - RNA, 21 nt, synthetic construct
  misc_feature 1..21: note = Synthetic
  source 1..21: mol_type = other RNA
ggaagatacagcaggtctgag

SEQ ID NO: 8323 - RNA, 21 nt, synthetic construct
  misc_feature 1..21: note = Synthetic
  source 1..21: mol_type = other RNA
gaagatacagcaggtctgagt

SEQ ID NO: 8324 - RNA, 21 nt, synthetic construct
  misc_feature 1..21: note = Synthetic
  source 1..21: mol_type = other RNA
aagatacagcaggtctgagtg

SEQ ID NO: 8325 - RNA, 21 nt, synthetic construct
  misc_feature 1..21: note = Synthetic
  source 1..21: mol_type = other RNA
agatacagcaggtctgagtgc

SEQ ID NO: 8326 - RNA, 21 nt, synthetic construct
  misc_feature 1..21: note = Synthetic
  source 1..21: mol_type = other RNA
gatacagcaggtctgagtgca

SEQ ID NO: 8327 - RNA, 21 nt, synthetic construct
  misc_feature 1..21: note = Synthetic
  source 1..21: mol_type = other RNA
atacagcaggtctgagtgcag

SEQ ID NO: 8328 - RNA, 21 nt, synthetic construct
  misc_feature 1..21: note = Synthetic
  source 1..21: mol_type = other RNA
tacagcaggtctgagtgcagc

SEQ ID NO: 8329 - RNA, 21 nt, synthetic construct
  misc_feature 1..21: note = Synthetic
  source 1..21: mol_type = other RNA
acagcaggtctgagtgcagct

SEQ ID NO: 8330 - RNA, 21 nt, synthetic construct
  misc_feature 1..21: note = Synthetic
  source 1..21: mol_type = other RNA
cagcaggtctgagtgcagctc

SEQ ID NO: 8331 - RNA, 21 nt, synthetic construct
  misc_feature 1..21: note = Synthetic
  source 1..21: mol_type = other RNA
agcaggtctgagtgcagctct

SEQ ID NO: 8332 - RNA, 21 nt, synthetic construct
  misc_feature 1..21: note = Synthetic
  source 1..21: mol_type = other RNA
gcaggtctgagtgcagctctg

SEQ ID NO: 8333 - RNA, 21 nt, synthetic construct
  misc_feature 1..21: note = Synthetic
  source 1..21: mol_type = other RNA
caggtctgagtgcagctctgg

SEQ ID NO: 8334 - RNA, 21 nt, synthetic construct
  misc_feature 1..21: note = Synthetic
  source 1..21: mol_type = other RNA
aggtctgagtgcagctctggg

SEQ ID NO: 8335 - RNA, 21 nt, synthetic construct
  misc_feature 1..21: note = Synthetic
  source 1..21: mol_type = other RNA
ggtctgagtgcagctctgggt

SEQ ID NO: 8336 - RNA, 21 nt, synthetic construct
  misc_feature 1..21: note = Synthetic
  source 1..21: mol_type = other RNA
gtctgagtgcagctctgggtg

SEQ ID NO: 8337 - RNA, 21 nt, synthetic construct
  misc_feature 1..21: note = Synthetic
  source 1..21: mol_type = other RNA
tctgagtgcagctctgggtgg

SEQ ID NO: 8338 - RNA, 21 nt, synthetic construct
  misc_feature 1..21: note = Synthetic
  source 1..21: mol_type = other RNA
ctgagtgcagctctgggtggg

SEQ ID NO: 8339 - RNA, 21 nt, synthetic construct
  misc_feature 1..21: note = Synthetic
  source 1..21: mol_type = other RNA
tgagtgcagctctgggtgggc

SEQ ID NO: 8340 - RNA, 21 nt, synthetic construct
  misc_feature 1..21: note = Synthetic
  source 1..21: mol_type = other RNA
gagtgcagctctgggtgggct

SEQ ID NO: 8341 - RNA, 21 nt, synthetic construct
  misc_feature 1..21: note = Synthetic
  source 1..21: mol_type = other RNA
agtgcagctctgggtgggctc

SEQ ID NO: 8342 - RNA, 21 nt, synthetic construct
  misc_feature 1..21: note = Synthetic
  source 1..21: mol_type = other RNA
gtgcagctctgggtgggctct

SEQ ID NO: 8343 - RNA, 21 nt, synthetic construct
  misc_feature 1..21: note = Synthetic
  source 1..21: mol_type = other RNA
tgcagctctgggtgggctctg

SEQ ID NO: 8344 - RNA, 21 nt, synthetic construct
  misc_feature 1..21: note = Synthetic
  source 1..21: mol_type = other RNA
gcagctctgggtgggctctgc

SEQ ID NO: 8345 - RNA, 21 nt, synthetic construct
  misc_feature 1..21: note = Synthetic
  source 1..21: mol_type = other RNA
cagctctgggtgggctctgcc

SEQ ID NO: 8346 - RNA, 21 nt, synthetic construct
  misc_feature 1..21: note = Synthetic
  source 1..21: mol_type = other RNA
agctctgggtgggctctgcct

SEQ ID NO: 8347 - RNA, 21 nt, synthetic construct
  misc_feature 1..21: note = Synthetic
  source 1..21: mol_type = other RNA
gctctgggtgggctctgcctc

SEQ ID NO: 8348 - RNA, 21 nt, synthetic construct
  misc_feature 1..21: note = Synthetic
  source 1..21: mol_type = other RNA
ctctgggtgggctctgcctcc

SEQ ID NO: 8349 - RNA, 21 nt, synthetic construct
  misc_feature 1..21: note = Synthetic
  source 1..21: mol_type = other RNA
tctgggtgggctctgcctcca

SEQ ID NO: 8350 - RNA, 21 nt, synthetic construct
  misc_feature 1..21: note = Synthetic
  source 1..21: mol_type = other RNA
ctgggtgggctctgcctccaa

SEQ ID NO: 8351 - RNA, 21 nt, synthetic construct
  misc_feature 1..21: note = Synthetic
  source 1..21: mol_type = other RNA
tgggtgggctctgcctccaag

SEQ ID NO: 8352 - RNA, 21 nt, synthetic construct
  misc_feature 1..21: note = Synthetic
  source 1..21: mol_type = other RNA
gggtgggctctgcctccaaga

SEQ ID NO: 8353 - RNA, 21 nt, synthetic construct
  misc_feature 1..21: note = Synthetic
  source 1..21: mol_type = other RNA
ggtgggctctgcctccaagat

SEQ ID NO: 8354 - RNA, 21 nt, synthetic construct
  misc_feature 1..21: note = Synthetic
  source 1..21: mol_type = other RNA
gtgggctctgcctccaagatg

SEQ ID NO: 8355 - RNA, 21 nt, synthetic construct
  misc_feature 1..21: note = Synthetic
  source 1..21: mol_type = other RNA
tgggctctgcctccaagatgc

SEQ ID NO: 8356 - RNA, 21 nt, synthetic construct
  misc_feature 1..21: note = Synthetic
  source 1..21: mol_type = other RNA
gggctctgcctccaagatgcc

SEQ ID NO: 8357 - RNA, 21 nt, synthetic construct
  misc_feature 1..21: note = Synthetic
  source 1..21: mol_type = other RNA
ggctctgcctccaagatgccc

SEQ ID NO: 8358 - RNA, 21 nt, synthetic construct
  misc_feature 1..21: note = Synthetic
  source 1..21: mol_type = other RNA
gctctgcctccaagatgccca

SEQ ID NO: 8359 - RNA, 21 nt, synthetic construct
  misc_feature 1..21: note = Synthetic
  source 1..21: mol_type = other RNA
ctctgcctccaagatgcccag

SEQ ID NO: 8360 - RNA, 21 nt, synthetic construct
  misc_feature 1..21: note = Synthetic
  source 1..21: mol_type = other RNA
tctgcctccaagatgcccagt

SEQ ID NO: 8361 - RNA, 21 nt, synthetic construct
  misc_feature 1..21: note = Synthetic
  source 1..21: mol_type = other RNA
ctgcctccaagatgcccagtt

SEQ ID NO: 8362 - RNA, 21 nt, synthetic construct
  misc_feature 1..21: note = Synthetic
  source 1..21: mol_type = other RNA
tgcctccaagatgcccagttc

SEQ ID NO: 8363 - RNA, 21 nt, synthetic construct
  misc_feature 1..21: note = Synthetic
  source 1..21: mol_type = other RNA
gcctccaagatgcccagttcc

SEQ ID NO: 8364 - RNA, 21 nt, synthetic construct
  misc_feature 1..21: note = Synthetic
  source 1..21: mol_type = other RNA
cctccaagatgcccagttcca

SEQ ID NO: 8365 - RNA, 21 nt, synthetic construct
  misc_feature 1..21: note = Synthetic
  source 1..21: mol_type = other RNA
ctccaagatgcccagttccaa

SEQ ID NO: 8366 - RNA, 21 nt, synthetic construct
  misc_feature 1..21: note = Synthetic
  source 1..21: mol_type = other RNA
tccaagatgcccagttccaac

SEQ ID NO: 8367 - RNA, 21 nt, synthetic construct
  misc_feature 1..21: note = Synthetic
  source 1..21: mol_type = other RNA
ccaagatgcccagttccaacc

SEQ ID NO: 8368 - RNA, 21 nt, synthetic construct
  misc_feature 1..21: note = Synthetic
  source 1..21: mol_type = other RNA
caagatgcccagttccaacct

SEQ ID NO: 8369 - RNA, 21 nt, synthetic construct
  misc_feature 1..21: note = Synthetic
  source 1..21: mol_type = other RNA
aagatgcccagttccaaccta

SEQ ID NO: 8370 - RNA, 21 nt, synthetic construct
  misc_feature 1..21: note = Synthetic
  source 1..21: mol_type = other RNA
agatgcccagttccaacctag

SEQ ID NO: 8371 - RNA, 21 nt, synthetic construct
  misc_feature 1..21: note = Synthetic
  source 1..21: mol_type = other RNA
gatgcccagttccaacctagc

SEQ ID NO: 8372 - RNA, 21 nt, synthetic construct
  misc_feature 1..21: note = Synthetic
  source 1..21: mol_type = other RNA
atgcccagttccaacctagcc

SEQ ID NO: 8373 - RNA, 21 nt, synthetic construct
  misc_feature 1..21: note = Synthetic
  source 1..21: mol_type = other RNA
tgcccagttccaacctagccc

SEQ ID NO: 8374 - RNA, 21 nt, synthetic construct
  misc_feature 1..21: note = Synthetic
  source 1..21: mol_type = other RNA
gcccagttccaacctagcccc

SEQ ID NO: 8375 - RNA, 21 nt, synthetic construct
  misc_feature 1..21: note = Synthetic
  source 1..21: mol_type = other RNA
cccagttccaacctagcccca

SEQ ID NO: 8376 - RNA, 21 nt, synthetic construct
  misc_feature 1..21: note = Synthetic
  source 1..21: mol_type = other RNA
ccagttccaacctagccccag

SEQ ID NO: 8377 - RNA, 21 nt, synthetic construct
  misc_feature 1..21: note = Synthetic
  source 1..21: mol_type = other RNA
cagttccaacctagccccaga

SEQ ID NO: 8378 - RNA, 21 nt, synthetic construct
  misc_feature 1..21: note = Synthetic
  source 1..21: mol_type = other RNA
agttccaacctagccccagaa

SEQ ID NO: 8379 - RNA, 21 nt, synthetic construct
  misc_feature 1..21: note = Synthetic
  source 1..21: mol_type = other RNA
gttccaacctagccccagaag

SEQ ID NO: 8380 - RNA, 21 nt, synthetic construct
  misc_feature 1..21: note = Synthetic
  source 1..21: mol_type = other RNA
ttccaacctagccccagaaga

SEQ ID NO: 8381 - RNA, 21 nt, synthetic construct
  misc_feature 1..21: note = Synthetic
  source 1..21: mol_type = other RNA
tccaacctagccccagaagat

SEQ ID NO: 8382 - RNA, 21 nt, synthetic construct
  misc_feature 1..21: note = Synthetic
  source 1..21: mol_type = other RNA
ccaacctagccccagaagatg

SEQ ID NO: 8383 - RNA, 21 nt, synthetic construct
  misc_feature 1..21: note = Synthetic
  source 1..21: mol_type = other RNA
caacctagccccagaagatgt

SEQ ID NO: 8384 - RNA, 21 nt, synthetic construct
  misc_feature 1..21: note = Synthetic
  source 1..21: mol_type = other RNA
aacctagccccagaagatgtg

SEQ ID NO: 8385 - RNA, 21 nt, synthetic construct
  misc_feature 1..21: note = Synthetic
  source 1..21: mol_type = other RNA
acctagccccagaagatgtgg

SEQ ID NO: 8386 - RNA, 21 nt, synthetic construct
  misc_feature 1..21: note = Synthetic
  source 1..21: mol_type = other RNA
cctagccccagaagatgtggt

SEQ ID NO: 8387 - RNA, 21 nt, synthetic construct
  misc_feature 1..21: note = Synthetic
  source 1..21: mol_type = other RNA
ctagccccagaagatgtggta

SEQ ID NO: 8388 - RNA, 21 nt, synthetic construct
  misc_feature 1..21: note = Synthetic
  source 1..21: mol_type = other RNA
tagccccagaagatgtggtac

SEQ ID NO: 8389 - RNA, 21 nt, synthetic construct
  misc_feature 1..21: note = Synthetic
  source 1..21: mol_type = other RNA
agccccagaagatgtggtaca

SEQ ID NO: 8390 - RNA, 21 nt, synthetic construct
  misc_feature 1..21: note = Synthetic
  source 1..21: mol_type = other RNA
gccccagaagatgtggtacat

SEQ ID NO: 8391 - RNA, 21 nt, synthetic construct
  misc_feature 1..21: note = Synthetic
  source 1..21: mol_type = other RNA
ccccagaagatgtggtacatc

SEQ ID NO: 8392 - RNA, 21 nt, synthetic construct
  misc_feature 1..21: note = Synthetic
  source 1..21: mol_type = other RNA
cccagaagatgtggtacatca

SEQ ID NO: 8393 - RNA, 21 nt, synthetic construct
  misc_feature 1..21: note = Synthetic
  source 1..21: mol_type = other RNA
ccagaagatgtggtacatcat

SEQ ID NO: 8394 - RNA, 21 nt, synthetic construct
  misc_feature 1..21: note = Synthetic
  source 1..21: mol_type = other RNA
cagaagatgtggtacatcatc

SEQ ID NO: 8395 - RNA, 21 nt, synthetic construct
  misc_feature 1..21: note = Synthetic
  source 1..21: mol_type = other RNA
agaagatgtggtacatcatct

SEQ ID NO: 8396 - RNA, 21 nt, synthetic construct
  misc_feature 1..21: note = Synthetic
  source 1..21: mol_type = other RNA
gaagatgtggtacatcatctt

SEQ ID NO: 8397 - RNA, 21 nt, synthetic construct
  misc_feature 1..21: note = Synthetic
  source 1..21: mol_type = other RNA
aagatgtggtacatcatcttc

SEQ ID NO: 8398 - RNA, 21 nt, synthetic construct
  misc_feature 1..21: note = Synthetic
  source 1..21: mol_type = other RNA
agatgtggtacatcatcttca

SEQ ID NO: 8399 - RNA, 21 nt, synthetic construct
  misc_feature 1..21: note = Synthetic
  source 1..21: mol_type = other RNA
gatgtggtacatcatcttcag

SEQ ID NO: 8400 - RNA, 21 nt, synthetic construct
  misc_feature 1..21: note = Synthetic
  source 1..21: mol_type = other RNA
atgtggtacatcatcttcagg

SEQ ID NO: 8401 - RNA, 21 nt, synthetic construct
  misc_feature 1..21: note = Synthetic
  source 1..21: mol_type = other RNA
tgtggtacatcatcttcaggt

SEQ ID NO: 8402 - RNA, 21 nt, synthetic construct
  misc_feature 1..21: note = Synthetic
  source 1..21: mol_type = other RNA
gtggtacatcatcttcaggta

SEQ ID NO: 8403 - RNA, 21 nt, synthetic construct
  misc_feature 1..21: note = Synthetic
  source 1..21: mol_type = other RNA
tggtacatcatcttcaggtag

SEQ ID NO: 8404 - RNA, 21 nt, synthetic construct
  misc_feature 1..21: note = Synthetic
  source 1..21: mol_type = other RNA
ggtacatcatcttcaggtaga

SEQ ID NO: 8405 - RNA, 21 nt, synthetic construct
  misc_feature 1..21: note = Synthetic
  source 1..21: mol_type = other RNA
gtacatcatcttcaggtagaa

SEQ ID NO: 8406 - RNA, 21 nt, synthetic construct
  misc_feature 1..21: note = Synthetic
  source 1..21: mol_type = other RNA
tacatcatcttcaggtagaaa

SEQ ID NO: 8407 - RNA, 21 nt, synthetic construct
  misc_feature 1..21: note = Synthetic
  source 1..21: mol_type = other RNA
acatcatcttcaggtagaaag

SEQ ID NO: 8408 - RNA, 21 nt, synthetic construct
  misc_feature 1..21: note = Synthetic
  source 1..21: mol_type = other RNA
catcatcttcaggtagaaagc

SEQ ID NO: 8409 - RNA, 21 nt, synthetic construct
  misc_feature 1..21: note = Synthetic
  source 1..21: mol_type = other RNA
atcatcttcaggtagaaagcc

SEQ ID NO: 8410 - RNA, 21 nt, synthetic construct
  misc_feature 1..21: note = Synthetic
  source 1..21: mol_type = other RNA
tcatcttcaggtagaaagccc

SEQ ID NO: 8411 - RNA, 21 nt, synthetic construct
  misc_feature 1..21: note = Synthetic
  source 1..21: mol_type = other RNA
catcttcaggtagaaagccca

SEQ ID NO: 8412 - RNA, 21 nt, synthetic construct
  misc_feature 1..21: note = Synthetic
  source 1..21: mol_type = other RNA
atcttcaggtagaaagcccaa

SEQ ID NO: 8413 - RNA, 21 nt, synthetic construct
  misc_feature 1..21: note = Synthetic
  source 1..21: mol_type = other RNA
tcttcaggtagaaagcccaaa

SEQ ID NO: 8414 - RNA, 21 nt, synthetic construct
  misc_feature 1..21: note = Synthetic
  source 1..21: mol_type = other RNA
cttcaggtagaaagcccaaat

SEQ ID NO: 8415 - RNA, 21 nt, synthetic construct
  misc_feature 1..21: note = Synthetic
  source 1..21: mol_type = other RNA
ttcaggtagaaagcccaaatc

SEQ ID NO: 8416 - RNA, 21 nt, synthetic construct
  misc_feature 1..21: note = Synthetic
  source 1..21: mol_type = other RNA
tcaggtagaaagcccaaatca

SEQ ID NO: 8417 - RNA, 21 nt, synthetic construct
  misc_feature 1..21: note = Synthetic
  source 1..21: mol_type = other RNA
caggtagaaagcccaaatcat

SEQ ID NO: 8418 - RNA, 21 nt, synthetic construct
  misc_feature 1..21: note = Synthetic
  source 1..21: mol_type = other RNA
aggtagaaagcccaaatcatc

SEQ ID NO: 8419 - RNA, 21 nt, synthetic construct
  misc_feature 1..21: note = Synthetic
  source 1..21: mol_type = other RNA
ggtagaaagcccaaatcatct

SEQ ID NO: 8420 - RNA, 21 nt, synthetic construct
  misc_feature 1..21: note = Synthetic
  source 1..21: mol_type = other RNA
gtagaaagcccaaatcatctg

SEQ ID NO: 8421 - RNA, 21 nt, synthetic construct
  misc_feature 1..21: note = Synthetic
  source 1..21: mol_type = other RNA
tagaaagcccaaatcatctgc

SEQ ID NO: 8422 - RNA, 21 nt, synthetic construct
  misc_feature 1..21: note = Synthetic
  source 1..21: mol_type = other RNA
agaaagcccaaatcatctgca

SEQ ID NO: 8423 - RNA, 21 nt, synthetic construct
  misc_feature 1..21: note = Synthetic
  source 1..21: mol_type = other RNA
gaaagcccaaatcatctgcag

SEQ ID NO: 8424 - RNA, 21 nt, synthetic construct
  misc_feature 1..21: note = Synthetic
  source 1..21: mol_type = other RNA
aaagcccaaatcatctgcagt

SEQ ID NO: 8425 - RNA, 21 nt, synthetic construct
  misc_feature 1..21: note = Synthetic
  source 1..21: mol_type = other RNA
aagcccaaatcatctgcagtt

SEQ ID NO: 8426 - RNA, 21 nt, synthetic construct
  misc_feature 1..21: note = Synthetic
  source 1..21: mol_type = other RNA
agcccaaatcatctgcagttt

SEQ ID NO: 8427 - RNA, 21 nt, synthetic construct
  misc_feature 1..21: note = Synthetic
  source 1..21: mol_type = other RNA
gcccaaatcatctgcagtttg

SEQ ID NO: 8428 - RNA, 21 nt, synthetic construct
  misc_feature 1..21: note = Synthetic
  source 1..21: mol_type = other RNA
cccaaatcatctgcagtttgg

SEQ ID NO: 8429 - RNA, 21 nt, synthetic construct
  misc_feature 1..21: note = Synthetic
  source 1..21: mol_type = other RNA
ccaaatcatctgcagtttgga

SEQ ID NO: 8430 - RNA, 21 nt, synthetic construct
  misc_feature 1..21: note = Synthetic
  source 1..21: mol_type = other RNA
caaatcatctgcagtttggaa

SEQ ID NO: 8431 - RNA, 21 nt, synthetic construct
  misc_feature 1..21: note = Synthetic
  source 1..21: mol_type = other RNA
aaatcatctgcagtttggaat

SEQ ID NO: 8432 - RNA, 21 nt, synthetic construct
  misc_feature 1..21: note = Synthetic
  source 1..21: mol_type = other RNA
aatcatctgcagtttggaatt

SEQ ID NO: 8433 - RNA, 21 nt, synthetic construct
  misc_feature 1..21: note = Synthetic
  source 1..21: mol_type = other RNA
atcatctgcagtttggaattt

SEQ ID NO: 8434 - RNA, 21 nt, synthetic construct
  misc_feature 1..21: note = Synthetic
  source 1..21: mol_type = other RNA
tcatctgcagtttggaatttt

SEQ ID NO: 8435 - RNA, 21 nt, synthetic construct
  misc_feature 1..21: note = Synthetic
  source 1..21: mol_type = other RNA
catctgcagtttggaattttt

SEQ ID NO: 8436 - RNA, 21 nt, synthetic construct
  misc_feature 1..21: note = Synthetic
  source 1..21: mol_type = other RNA
atctgcagtttggaatttttt

SEQ ID NO: 8437 - RNA, 21 nt, synthetic construct
  misc_feature 1..21: note = Synthetic
  source 1..21: mol_type = other RNA
tctgcagtttggaattttttt

SEQ ID NO: 8438 - RNA, 21 nt, synthetic construct
  misc_feature 1..21: note = Synthetic
  source 1..21: mol_type = other RNA
ctgcagtttggaattttttta

SEQ ID NO: 8439 - RNA, 21 nt, synthetic construct
  misc_feature 1..21: note = Synthetic
  source 1..21: mol_type = other RNA
tgcagtttggaatttttttaa

SEQ ID NO: 8440 - RNA, 21 nt, synthetic construct
  misc_feature 1..21: note = Synthetic
  source 1..21: mol_type = other RNA
gcagtttggaatttttttaaa

SEQ ID NO: 8441 - RNA, 21 nt, synthetic construct
  misc_feature 1..21: note = Synthetic
  source 1..21: mol_type = other RNA
cagtttggaatttttttaaaa

SEQ ID NO: 8442 - RNA, 21 nt, synthetic construct
  misc_feature 1..21: note = Synthetic
  source 1..21: mol_type = other RNA
agtttggaatttttttaaaaa

SEQ ID NO: 8443 - RNA, 21 nt, synthetic construct
  misc_feature 1..21: note = Synthetic
  source 1..21: mol_type = other RNA
gtttggaatttttttaaaaac

SEQ ID NO: 8444 - RNA, 21 nt, synthetic construct
  misc_feature 1..21: note = Synthetic
  source 1..21: mol_type = other RNA
tttggaatttttttaaaaaca

SEQ ID NO: 8445 - RNA, 21 nt, synthetic construct
  misc_feature 1..21: note = Synthetic
  source 1..21: mol_type = other RNA
ttggaatttttttaaaaacac

SEQ ID NO: 8446 - RNA, 21 nt, synthetic construct
  misc_feature 1..21: note = Synthetic
  source 1..21: mol_type = other RNA
tggaatttttttaaaaacacc

SEQ ID NO: 8447 - RNA, 21 nt, synthetic construct
  misc_feature 1..21: note = Synthetic
  source 1..21: mol_type = other RNA
ggaatttttttaaaaacacca

SEQ ID NO: 8448 - RNA, 21 nt, synthetic construct
  misc_feature 1..21: note = Synthetic
  source 1..21: mol_type = other RNA
gaatttttttaaaaacaccag

SEQ ID NO: 8449 - RNA, 21 nt, synthetic construct
  misc_feature 1..21: note = Synthetic
  source 1..21: mol_type = other RNA
aatttttttaaaaacaccagc

SEQ ID NO: 8450 - RNA, 21 nt, synthetic construct
  misc_feature 1..21: note = Synthetic
  source 1..21: mol_type = other RNA
atttttttaaaaacaccagca

SEQ ID NO: 8451 - RNA, 21 nt, synthetic construct
  misc_feature 1..21: note = Synthetic
  source 1..21: mol_type = other RNA
tttttttaaaaacaccagcat

SEQ ID NO: 8452 - RNA, 21 nt, synthetic construct
  misc_feature 1..21: note = Synthetic
  source 1..21: mol_type = other RNA
ttttttaaaaacaccagcatg

SEQ ID NO: 8453 - RNA, 21 nt, synthetic construct
  misc_feature 1..21: note = Synthetic
  source 1..21: mol_type = other RNA
tttttaaaaacaccagcatgg

SEQ ID NO: 8454 - RNA, 21 nt, synthetic construct
  misc_feature 1..21: note = Synthetic
  source 1..21: mol_type = other RNA
ttttaaaaacaccagcatgga

SEQ ID NO: 8455 - RNA, 21 nt, synthetic construct
  misc_feature 1..21: note = Synthetic
  source 1..21: mol_type = other RNA
tttaaaaacaccagcatggaa

SEQ ID NO: 8456 - RNA, 21 nt, synthetic construct
  misc_feature 1..21: note = Synthetic
  source 1..21: mol_type = other RNA
ttaaaaacaccagcatggaat

SEQ ID NO: 8457 - RNA, 21 nt, synthetic construct
  misc_feature 1..21: note = Synthetic
  source 1..21: mol_type = other RNA
taaaaacaccagcatggaatt

SEQ ID NO: 8458 - RNA, 21 nt, synthetic construct
  misc_feature 1..21: note = Synthetic
  source 1..21: mol_type = other RNA
aaaaacaccagcatggaattg

SEQ ID NO: 8459 - RNA, 21 nt, synthetic construct
  misc_feature 1..21: note = Synthetic
  source 1..21: mol_type = other RNA
aaaacaccagcatggaattgg

SEQ ID NO: 8460 - RNA, 21 nt, synthetic construct
  misc_feature 1..21: note = Synthetic
  source 1..21: mol_type = other RNA
aaacaccagcatggaattgga

SEQ ID NO: 8461 - RNA, 21 nt, synthetic construct
  misc_feature 1..21: note = Synthetic
  source 1..21: mol_type = other RNA
aacaccagcatggaattggag

SEQ ID NO: 8462 - RNA, 21 nt, synthetic construct
  misc_feature 1..21: note = Synthetic
  source 1..21: mol_type = other RNA
acaccagcatggaattggagg

SEQ ID NO: 8463 - RNA, 21 nt, synthetic construct
  misc_feature 1..21: note = Synthetic
  source 1..21: mol_type = other RNA
caccagcatggaattggagga

SEQ ID NO: 8464 - RNA, 21 nt, synthetic construct
  misc_feature 1..21: note = Synthetic
  source 1..21: mol_type = other RNA
accagcatggaattggaggag

SEQ ID NO: 8465 - RNA, 21 nt, synthetic construct
  misc_feature 1..21: note = Synthetic
  source 1..21: mol_type = other RNA
ccagcatggaattggaggagt

SEQ ID NO: 8466 - RNA, 21 nt, synthetic construct
  misc_feature 1..21: note = Synthetic
  source 1..21: mol_type = other RNA
cagcatggaattggaggagtg

SEQ ID NO: 8467 - RNA, 21 nt, synthetic construct
  misc_feature 1..21: note = Synthetic
  source 1..21: mol_type = other RNA
agcatggaattggaggagtgt

SEQ ID NO: 8468 - RNA, 21 nt, synthetic construct
  misc_feature 1..21: note = Synthetic
  source 1..21: mol_type = other RNA
gcatggaattggaggagtgtg

SEQ ID NO: 8469 - RNA, 21 nt, synthetic construct
  misc_feature 1..21: note = Synthetic
  source 1..21: mol_type = other RNA
catggaattggaggagtgtgt

SEQ ID NO: 8470 - RNA, 21 nt, synthetic construct
  misc_feature 1..21: note = Synthetic
  source 1..21: mol_type = other RNA
atggaattggaggagtgtgtc

SEQ ID NO: 8471 - RNA, 21 nt, synthetic construct
  misc_feature 1..21: note = Synthetic
  source 1..21: mol_type = other RNA
tggaattggaggagtgtgtcc

SEQ ID NO: 8472 - RNA, 21 nt, synthetic construct
  misc_feature 1..21: note = Synthetic
  source 1..21: mol_type = other RNA
ggaattggaggagtgtgtcct

SEQ ID NO: 8473 - RNA, 21 nt, synthetic construct
  misc_feature 1..21: note = Synthetic
  source 1..21: mol_type = other RNA
gaattggaggagtgtgtccta

SEQ ID NO: 8474 - RNA, 21 nt, synthetic construct
  misc_feature 1..21: note = Synthetic
  source 1..21: mol_type = other RNA
aattggaggagtgtgtcctaa

SEQ ID NO: 8475 - RNA, 21 nt, synthetic construct
  misc_feature 1..21: note = Synthetic
  source 1..21: mol_type = other RNA
attggaggagtgtgtcctaaa

SEQ ID NO: 8476 - RNA, 21 nt, synthetic construct
  misc_feature 1..21: note = Synthetic
  source 1..21: mol_type = other RNA
ttggaggagtgtgtcctaaaa

SEQ ID NO: 8477 - RNA, 21 nt, synthetic construct
  misc_feature 1..21: note = Synthetic
  source 1..21: mol_type = other RNA
tggaggagtgtgtcctaaaag

SEQ ID NO: 8478 - RNA, 21 nt, synthetic construct
  misc_feature 1..21: note = Synthetic
  source 1..21: mol_type = other RNA
ggaggagtgtgtcctaaaagc

SEQ ID NO: 8479 - RNA, 21 nt, synthetic construct
  misc_feature 1..21: note = Synthetic
  source 1..21: mol_type = other RNA
gaggagtgtgtcctaaaagcc

SEQ ID NO: 8480 - RNA, 21 nt, synthetic construct
  misc_feature 1..21: note = Synthetic
  source 1..21: mol_type = other RNA
aggagtgtgtcctaaaagccc

SEQ ID NO: 8481 - RNA, 21 nt, synthetic construct
  misc_feature 1..21: note = Synthetic
  source 1..21: mol_type = other RNA
ggagtgtgtcctaaaagcccg

SEQ ID NO: 8482 - RNA, 21 nt, synthetic construct
  misc_feature 1..21: note = Synthetic
  source 1..21: mol_type = other RNA
gagtgtgtcctaaaagcccgg

SEQ ID NO: 8483 - RNA, 21 nt, synthetic construct
  misc_feature 1..21: note = Synthetic
  source 1..21: mol_type = other RNA
agtgtgtcctaaaagcccggc

SEQ ID NO: 8484 - RNA, 21 nt, synthetic construct
  misc_feature 1..21: note = Synthetic
  source 1..21: mol_type = other RNA
gtgtgtcctaaaagcccggca

SEQ ID NO: 8485 - RNA, 21 nt, synthetic construct
  misc_feature 1..21: note = Synthetic
  source 1..21: mol_type = other RNA
tgtgtcctaaaagcccggcag

SEQ ID NO: 8486 - RNA, 21 nt, synthetic construct
  misc_feature 1..21: note = Synthetic
  source 1..21: mol_type = other RNA
gtgtcctaaaagcccggcagc

SEQ ID NO: 8487 - RNA, 21 nt, synthetic construct
  misc_feature 1..21: note = Synthetic
  source 1..21: mol_type = other RNA
tgtcctaaaagcccggcagct

SEQ ID NO: 8488 - RNA, 21 nt, synthetic construct
  misc_feature 1..21: note = Synthetic
  source 1..21: mol_type = other RNA
gtcctaaaagcccggcagctc

SEQ ID NO: 8489 - RNA, 21 nt, synthetic construct
  misc_feature 1..21: note = Synthetic
  source 1..21: mol_type = other RNA
tcctaaaagcccggcagctct

SEQ ID NO: 8490 - RNA, 21 nt, synthetic construct
  misc_feature 1..21: note = Synthetic
  source 1..21: mol_type = other RNA
cctaaaagcccggcagctctg

SEQ ID NO: 8491 - RNA, 21 nt, synthetic construct
  misc_feature 1..21: note = Synthetic
  source 1..21: mol_type = other RNA
ctaaaagcccggcagctctgg

SEQ ID NO: 8492 - RNA, 21 nt, synthetic construct
  misc_feature 1..21: note = Synthetic
  source 1..21: mol_type = other RNA
taaaagcccggcagctctggg

SEQ ID NO: 8493 - RNA, 21 nt, synthetic construct
  misc_feature 1..21: note = Synthetic
  source 1..21: mol_type = other RNA
aaaagcccggcagctctgggg

SEQ ID NO: 8494 - RNA, 21 nt, synthetic construct
  misc_feature 1..21: note = Synthetic
  source 1..21: mol_type = other RNA
aaagcccggcagctctggggc

SEQ ID NO: 8495 - RNA, 21 nt, synthetic construct
  misc_feature 1..21: note = Synthetic
  source 1..21: mol_type = other RNA
aagcccggcagctctggggcc

SEQ ID NO: 8496 - RNA, 21 nt, synthetic construct
  misc_feature 1..21: note = Synthetic
  source 1..21: mol_type = other RNA
agcccggcagctctggggcct

SEQ ID NO: 8497 - RNA, 21 nt, synthetic construct
  misc_feature 1..21: note = Synthetic
  source 1..21: mol_type = other RNA
gcccggcagctctggggcctg

SEQ ID NO: 8498 - RNA, 21 nt, synthetic construct
  misc_feature 1..21: note = Synthetic
  source 1..21: mol_type = other RNA
cccggcagctctggggcctgc

SEQ ID NO: 8499 - RNA, 21 nt, synthetic construct
  misc_feature 1..21: note = Synthetic
  source 1..21: mol_type = other RNA
ccggcagctctggggcctgct

SEQ ID NO: 8500 - RNA, 21 nt, synthetic construct
  misc_feature 1..21: note = Synthetic
  source 1..21: mol_type = other RNA
cggcagctctggggcctgctg

SEQ ID NO: 8501 - RNA, 21 nt, synthetic construct
  misc_feature 1..21: note = Synthetic
  source 1..21: mol_type = other RNA
ggcagctctggggcctgctgc

SEQ ID NO: 8502 - RNA, 21 nt, synthetic construct
  misc_feature 1..21: note = Synthetic
  source 1..21: mol_type = other RNA
gcagctctggggcctgctgca

SEQ ID NO: 8503 - RNA, 21 nt, synthetic construct
  misc_feature 1..21: note = Synthetic
  source 1..21: mol_type = other RNA
cagctctggggcctgctgcag

SEQ ID NO: 8504 - RNA, 21 nt, synthetic construct
  misc_feature 1..21: note = Synthetic
  source 1..21: mol_type = other RNA
agctctggggcctgctgcagt

SEQ ID NO: 8505 - RNA, 21 nt, synthetic construct
  misc_feature 1..21: note = Synthetic
  source 1..21: mol_type = other RNA
gctctggggcctgctgcagtc

SEQ ID NO: 8506 - RNA, 21 nt, synthetic construct
  misc_feature 1..21: note = Synthetic
  source 1..21: mol_type = other RNA
ctctggggcctgctgcagtct

SEQ ID NO: 8507 - RNA, 21 nt, synthetic construct
  misc_feature 1..21: note = Synthetic
  source 1..21: mol_type = other RNA
tctggggcctgctgcagtctg

SEQ ID NO: 8508 - RNA, 21 nt, synthetic construct
  misc_feature 1..21: note = Synthetic
  source 1..21: mol_type = other RNA
ctggggcctgctgcagtctgc

SEQ ID NO: 8509 - RNA, 21 nt, synthetic construct
  misc_feature 1..21: note = Synthetic
  source 1..21: mol_type = other RNA
tggggcctgctgcagtctgcc

SEQ ID NO: 8510 - RNA, 21 nt, synthetic construct
  misc_feature 1..21: note = Synthetic
  source 1..21: mol_type = other RNA
ggggcctgctgcagtctgcct

SEQ ID NO: 8511 - RNA, 21 nt, synthetic construct
  misc_feature 1..21: note = Synthetic
  source 1..21: mol_type = other RNA
gggcctgctgcagtctgcctg

SEQ ID NO: 8512 - RNA, 21 nt, synthetic construct
  misc_feature 1..21: note = Synthetic
  source 1..21: mol_type = other RNA
ggcctgctgcagtctgcctga

SEQ ID NO: 8513 - RNA, 21 nt, synthetic construct
  misc_feature 1..21: note = Synthetic
  source 1..21: mol_type = other RNA
gcctgctgcagtctgcctgaa

SEQ ID NO: 8514 - RNA, 21 nt, synthetic construct
  misc_feature 1..21: note = Synthetic
  source 1..21: mol_type = other RNA
cctgctgcagtctgcctgaat

SEQ ID NO: 8515 - RNA, 21 nt, synthetic construct
  misc_feature 1..21: note = Synthetic
  source 1..21: mol_type = other RNA
ctgctgcagtctgcctgaatg

SEQ ID NO: 8516 - RNA, 21 nt, synthetic construct
  misc_feature 1..21: note = Synthetic
  source 1..21: mol_type = other RNA
tgctgcagtctgcctgaatgc

SEQ ID NO: 8517 - RNA, 21 nt, synthetic construct
  misc_feature 1..21: note = Synthetic
  source 1..21: mol_type = other RNA
gctgcagtctgcctgaatgca

SEQ ID NO: 8518 - RNA, 21 nt, synthetic construct
  misc_feature 1..21: note = Synthetic
  source 1..21: mol_type = other RNA
ctgcagtctgcctgaatgcac

SEQ ID NO: 8519 - RNA, 21 nt, synthetic construct
  misc_feature 1..21: note = Synthetic
  source 1..21: mol_type = other RNA
tgcagtctgcctgaatgcaca

SEQ ID NO: 8520 - RNA, 21 nt, synthetic construct
  misc_feature 1..21: note = Synthetic
  source 1..21: mol_type = other RNA
gcagtctgcctgaatgcacat

SEQ ID NO: 8521 - RNA, 21 nt, synthetic construct
  misc_feature 1..21: note = Synthetic
  source 1..21: mol_type = other RNA
cagtctgcctgaatgcacatc

SEQ ID NO: 8522 - RNA, 21 nt, synthetic construct
  misc_feature 1..21: note = Synthetic
  source 1..21: mol_type = other RNA
agtctgcctgaatgcacatcc

SEQ ID NO: 8523 - RNA, 21 nt, synthetic construct
  misc_feature 1..21: note = Synthetic
  source 1..21: mol_type = other RNA
gtctgcctgaatgcacatccc

SEQ ID NO: 8524 - RNA, 21 nt, synthetic construct
  misc_feature 1..21: note = Synthetic
  source 1..21: mol_type = other RNA
tctgcctgaatgcacatccct

SEQ ID NO: 8525 - RNA, 21 nt, synthetic construct
  misc_feature 1..21: note = Synthetic
  source 1..21: mol_type = other RNA
ctgcctgaatgcacatccctt

SEQ ID NO: 8526 - RNA, 21 nt, synthetic construct
  misc_feature 1..21: note = Synthetic
  source 1..21: mol_type = other RNA
tgcctgaatgcacatcccttc

SEQ ID NO: 8527 - RNA, 21 nt, synthetic construct
  misc_feature 1..21: note = Synthetic
  source 1..21: mol_type = other RNA
gcctgaatgcacatcccttct

SEQ ID NO: 8528 - RNA, 21 nt, synthetic construct
  misc_feature 1..21: note = Synthetic
  source 1..21: mol_type = other RNA
cctgaatgcacatcccttcta

SEQ ID NO: 8529 - RNA, 21 nt, synthetic construct
  misc_feature 1..21: note = Synthetic
  source 1..21: mol_type = other RNA
ctgaatgcacatcccttctag

SEQ ID NO: 8530 - RNA, 21 nt, synthetic construct
  misc_feature 1..21: note = Synthetic
  source 1..21: mol_type = other RNA
tgaatgcacatcccttctagc

SEQ ID NO: 8531 - RNA, 21 nt, synthetic construct
  misc_feature 1..21: note = Synthetic
  source 1..21: mol_type = other RNA
gaatgcacatcccttctagcc

SEQ ID NO: 8532 - RNA, 21 nt, synthetic construct
  misc_feature 1..21: note = Synthetic
  source 1..21: mol_type = other RNA
aatgcacatcccttctagcca

SEQ ID NO: 8533 - RNA, 21 nt, synthetic construct
  misc_feature 1..21: note = Synthetic
  source 1..21: mol_type = other RNA
atgcacatcccttctagccac

SEQ ID NO: 8534 - RNA, 21 nt, synthetic construct
  misc_feature 1..21: note = Synthetic
  source 1..21: mol_type = other RNA
tgcacatcccttctagccacc

SEQ ID NO: 8535 - RNA, 21 nt, synthetic construct
  misc_feature 1..21: note = Synthetic
  source 1..21: mol_type = other RNA
gcacatcccttctagccacca

SEQ ID NO: 8536 - RNA, 21 nt, synthetic construct
  misc_feature 1..21: note = Synthetic
  source 1..21: mol_type = other RNA
cacatcccttctagccaccaa

SEQ ID NO: 8537 - RNA, 21 nt, synthetic construct
  misc_feature 1..21: note = Synthetic
  source 1..21: mol_type = other RNA
acatcccttctagccaccaaa

SEQ ID NO: 8538 - RNA, 21 nt, synthetic construct
  misc_feature 1..21: note = Synthetic
  source 1..21: mol_type = other RNA
catcccttctagccaccaaaa

SEQ ID NO: 8539 - RNA, 21 nt, synthetic construct
  misc_feature 1..21: note = Synthetic
  source 1..21: mol_type = other RNA
atcccttctagccaccaaaag

SEQ ID NO: 8540 - RNA, 21 nt, synthetic construct
  misc_feature 1..21: note = Synthetic
  source 1..21: mol_type = other RNA
tcccttctagccaccaaaaga

SEQ ID NO: 8541 - RNA, 21 nt, synthetic construct
  misc_feature 1..21: note = Synthetic
  source 1..21: mol_type = other RNA
cccttctagccaccaaaagac

SEQ ID NO: 8542 - RNA, 21 nt, synthetic construct
  misc_feature 1..21: note = Synthetic
  source 1..21: mol_type = other RNA
ccttctagccaccaaaagaca

SEQ ID NO: 8543 - RNA, 21 nt, synthetic construct
  misc_feature 1..21: note = Synthetic
  source 1..21: mol_type = other RNA
cttctagccaccaaaagacat

SEQ ID NO: 8544 - RNA, 21 nt, synthetic construct
  misc_feature 1..21: note = Synthetic
  source 1..21: mol_type = other RNA
ttctagccaccaaaagacatg

SEQ ID NO: 8545 - RNA, 21 nt, synthetic construct
  misc_feature 1..21: note = Synthetic
  source 1..21: mol_type = other RNA
tctagccaccaaaagacatgg

SEQ ID NO: 8546 - RNA, 21 nt, synthetic construct
  misc_feature 1..21: note = Synthetic
  source 1..21: mol_type = other RNA
ctagccaccaaaagacatggc

SEQ ID NO: 8547 - RNA, 21 nt, synthetic construct
  misc_feature 1..21: note = Synthetic
  source 1..21: mol_type = other RNA
tagccaccaaaagacatggca

SEQ ID NO: 8548 - RNA, 21 nt, synthetic construct
  misc_feature 1..21: note = Synthetic
  source 1..21: mol_type = other RNA
agccaccaaaagacatggcag

SEQ ID NO: 8549 - RNA, 21 nt, synthetic construct
  misc_feature 1..21: note = Synthetic
  source 1..21: mol_type = other RNA
gccaccaaaagacatggcagg

SEQ ID NO: 8550 - RNA, 21 nt, synthetic construct
  misc_feature 1..21: note = Synthetic
  source 1..21: mol_type = other RNA
ccaccaaaagacatggcaggc

SEQ ID NO: 8551 - RNA, 21 nt, synthetic construct
  misc_feature 1..21: note = Synthetic
  source 1..21: mol_type = other RNA
caccaaaagacatggcaggca

SEQ ID NO: 8552 - RNA, 21 nt, synthetic construct
  misc_feature 1..21: note = Synthetic
  source 1..21: mol_type = other RNA
accaaaagacatggcaggcag

SEQ ID NO: 8553 - RNA, 21 nt, synthetic construct
  misc_feature 1..21: note = Synthetic
  source 1..21: mol_type = other RNA
ccaaaagacatggcaggcaga

SEQ ID NO: 8554 - RNA, 21 nt, synthetic construct
  misc_feature 1..21: note = Synthetic
  source 1..21: mol_type = other RNA
caaaagacatggcaggcagag

SEQ ID NO: 8555 - RNA, 21 nt, synthetic construct
  misc_feature 1..21: note = Synthetic
  source 1..21: mol_type = other RNA
aaaagacatggcaggcagagt

SEQ ID NO: 8556 - RNA, 21 nt, synthetic construct
  misc_feature 1..21: note = Synthetic
  source 1..21: mol_type = other RNA
aaagacatggcaggcagagtc

SEQ ID NO: 8557 - RNA, 21 nt, synthetic construct
  misc_feature 1..21: note = Synthetic
  source 1..21: mol_type = other RNA
aagacatggcaggcagagtcc

SEQ ID NO: 8558 - RNA, 21 nt, synthetic construct
  misc_feature 1..21: note = Synthetic
  source 1..21: mol_type = other RNA
agacatggcaggcagagtcct

SEQ ID NO: 8559 - RNA, 21 nt, synthetic construct
  misc_feature 1..21: note = Synthetic
  source 1..21: mol_type = other RNA
gacatggcaggcagagtcctg

SEQ ID NO: 8560 - RNA, 21 nt, synthetic construct
  misc_feature 1..21: note = Synthetic
  source 1..21: mol_type = other RNA
acatggcaggcagagtcctgg

SEQ ID NO: 8561 - RNA, 21 nt, synthetic construct
  misc_feature 1..21: note = Synthetic
  source 1..21: mol_type = other RNA
catggcaggcagagtcctggc

SEQ ID NO: 8562 - RNA, 21 nt, synthetic construct
  misc_feature 1..21: note = Synthetic
  source 1..21: mol_type = other RNA
atggcaggcagagtcctggca

SEQ ID NO: 8563 - RNA, 21 nt, synthetic construct
  misc_feature 1..21: note = Synthetic
  source 1..21: mol_type = other RNA
tggcaggcagagtcctggcag

SEQ ID NO: 8564 - RNA, 21 nt, synthetic construct
  misc_feature 1..21: note = Synthetic
  source 1..21: mol_type = other RNA
ggcaggcagagtcctggcagc

SEQ ID NO: 8565 - RNA, 21 nt, synthetic construct
  misc_feature 1..21: note = Synthetic
  source 1..21: mol_type = other RNA
gcaggcagagtcctggcagca

SEQ ID NO: 8566 - RNA, 21 nt, synthetic construct
  misc_feature 1..21: note = Synthetic
  source 1..21: mol_type = other RNA
caggcagagtcctggcagcag

SEQ ID NO: 8567 - RNA, 21 nt, synthetic construct
  misc_feature 1..21: note = Synthetic
  source 1..21: mol_type = other RNA
aggcagagtcctggcagcagg

SEQ ID NO: 8568 - RNA, 21 nt, synthetic construct
  misc_feature 1..21: note = Synthetic
  source 1..21: mol_type = other RNA
ggcagagtcctggcagcaggc

SEQ ID NO: 8569 - RNA, 21 nt, synthetic construct
  misc_feature 1..21: note = Synthetic
  source 1..21: mol_type = other RNA
gcagagtcctggcagcaggca

SEQ ID NO: 8570 - RNA, 21 nt, synthetic construct
  misc_feature 1..21: note = Synthetic
  source 1..21: mol_type = other RNA
cagagtcctggcagcaggcag

SEQ ID NO: 8571 - RNA, 21 nt, synthetic construct
  misc_feature 1..21: note = Synthetic
  source 1..21: mol_type = other RNA
agagtcctggcagcaggcagc

SEQ ID NO: 8572 - RNA, 21 nt, synthetic construct
  misc_feature 1..21: note = Synthetic
  source 1..21: mol_type = other RNA
gagtcctggcagcaggcagcc

SEQ ID NO: 8573 - RNA, 21 nt, synthetic construct
  misc_feature 1..21: note = Synthetic
  source 1..21: mol_type = other RNA
agtcctggcagcaggcagccc

SEQ ID NO: 8574 - RNA, 21 nt, synthetic construct
  misc_feature 1..21: note = Synthetic
  source 1..21: mol_type = other RNA
gtcctggcagcaggcagccca

SEQ ID NO: 8575 - RNA, 21 nt, synthetic construct
  misc_feature 1..21: note = Synthetic
  source 1..21: mol_type = other RNA
tcctggcagcaggcagcccaa

SEQ ID NO: 8576 - RNA, 21 nt, synthetic construct
  misc_feature 1..21: note = Synthetic
  source 1..21: mol_type = other RNA
cctggcagcaggcagcccaac

SEQ ID NO: 8577 - RNA, 21 nt, synthetic construct
  misc_feature 1..21: note = Synthetic
  source 1..21: mol_type = other RNA
ctggcagcaggcagcccaaca

SEQ ID NO: 8578 - RNA, 21 nt, synthetic construct
  misc_feature 1..21: note = Synthetic
  source 1..21: mol_type = other RNA
tggcagcaggcagcccaacat

SEQ ID NO: 8579 - RNA, 21 nt, synthetic construct
  misc_feature 1..21: note = Synthetic
  source 1..21: mol_type = other RNA
ggcagcaggcagcccaacatg

SEQ ID NO: 8580 - RNA, 21 nt, synthetic construct
  misc_feature 1..21: note = Synthetic
  source 1..21: mol_type = other RNA
gcagcaggcagcccaacatga

SEQ ID NO: 8581 - RNA, 21 nt, synthetic construct
  misc_feature 1..21: note = Synthetic
  source 1..21: mol_type = other RNA
cagcaggcagcccaacatgac

SEQ ID NO: 8582 - RNA, 21 nt, synthetic construct
  misc_feature 1..21: note = Synthetic
  source 1..21: mol_type = other RNA
agcaggcagcccaacatgact

SEQ ID NO: 8583 - RNA, 21 nt, synthetic construct
  misc_feature 1..21: note = Synthetic
  source 1..21: mol_type = other RNA
gcaggcagcccaacatgactg

SEQ ID NO: 8584 - RNA, 21 nt, synthetic construct
  misc_feature 1..21: note = Synthetic
  source 1..21: mol_type = other RNA
caggcagcccaacatgactgg

SEQ ID NO: 8585 - RNA, 21 nt, synthetic construct
  misc_feature 1..21: note = Synthetic
  source 1..21: mol_type = other RNA
aggcagcccaacatgactgga

SEQ ID NO: 8586 - RNA, 21 nt, synthetic construct
  misc_feature 1..21: note = Synthetic
  source 1..21: mol_type = other RNA
ggcagcccaacatgactggag

SEQ ID NO: 8587 - RNA, 21 nt, synthetic construct
  misc_feature 1..21: note = Synthetic
  source 1..21: mol_type = other RNA
gcagcccaacatgactggaga

SEQ ID NO: 8588 - RNA, 21 nt, synthetic construct
  misc_feature 1..21: note = Synthetic
  source 1..21: mol_type = other RNA
cagcccaacatgactggagag

SEQ ID NO: 8589 - RNA, 21 nt, synthetic construct
  misc_feature 1..21: note = Synthetic
  source 1..21: mol_type = other RNA
agcccaacatgactggagaga

SEQ ID NO: 8590 - RNA, 21 nt, synthetic construct
  misc_feature 1..21: note = Synthetic
  source 1..21: mol_type = other RNA
gcccaacatgactggagagag

SEQ ID NO: 8591 - RNA, 21 nt, synthetic construct
  misc_feature 1..21: note = Synthetic
  source 1..21: mol_type = other RNA
cccaacatgactggagagagg

SEQ ID NO: 8592 - RNA, 21 nt, synthetic construct
  misc_feature 1..21: note = Synthetic
  source 1..21: mol_type = other RNA
ccaacatgactggagagaggg

SEQ ID NO: 8593 - RNA, 21 nt, synthetic construct
  misc_feature 1..21: note = Synthetic
  source 1..21: mol_type = other RNA
caacatgactggagagagggg

SEQ ID NO: 8594 - RNA, 21 nt, synthetic construct
  misc_feature 1..21: note = Synthetic
  source 1..21: mol_type = other RNA
aacatgactggagagaggggg

SEQ ID NO: 8595 - RNA, 21 nt, synthetic construct
  misc_feature 1..21: note = Synthetic
  source 1..21: mol_type = other RNA
acatgactggagagagggggt

SEQ ID NO: 8596 - RNA, 21 nt, synthetic construct
  misc_feature 1..21: note = Synthetic
  source 1..21: mol_type = other RNA
catgactggagagagggggtt

SEQ ID NO: 8597 - RNA, 21 nt, synthetic construct
  misc_feature 1..21: note = Synthetic
  source 1..21: mol_type = other RNA
atgactggagagagggggttc

SEQ ID NO: 8598 - RNA, 21 nt, synthetic construct
  misc_feature 1..21: note = Synthetic
  source 1..21: mol_type = other RNA
tgactggagagagggggttcc

SEQ ID NO: 8599 - RNA, 21 nt, synthetic construct
  misc_feature 1..21: note = Synthetic
  source 1..21: mol_type = other RNA
gactggagagagggggttcct

SEQ ID NO: 8600 - RNA, 21 nt, synthetic construct
  misc_feature 1..21: note = Synthetic
  source 1..21: mol_type = other RNA
actggagagagggggttcctt

SEQ ID NO: 8601 - RNA, 21 nt, synthetic construct
  misc_feature 1..21: note = Synthetic
  source 1..21: mol_type = other RNA
ctggagagagggggttccttc

SEQ ID NO: 8602 - RNA, 21 nt, synthetic construct
  misc_feature 1..21: note = Synthetic
  source 1..21: mol_type = other RNA
tggagagagggggttccttca

SEQ ID NO: 8603 - RNA, 21 nt, synthetic construct
  misc_feature 1..21: note = Synthetic
  source 1..21: mol_type = other RNA
ggagagagggggttccttcaa

SEQ ID NO: 8604 - RNA, 21 nt, synthetic construct
  misc_feature 1..21: note = Synthetic
  source 1..21: mol_type = other RNA
gagagagggggttccttcaag

SEQ ID NO: 8605 - RNA, 21 nt, synthetic construct
  misc_feature 1..21: note = Synthetic
  source 1..21: mol_type = other RNA
agagagggggttccttcaaga

SEQ ID NO: 8606 - RNA, 21 nt, synthetic construct
  misc_feature 1..21: note = Synthetic
  source 1..21: mol_type = other RNA
gagagggggttccttcaagaa

SEQ ID NO: 8607 - RNA, 21 nt, synthetic construct
  misc_feature 1..21: note = Synthetic
  source 1..21: mol_type = other RNA
agagggggttccttcaagaag

SEQ ID NO: 8608 - RNA, 21 nt, synthetic construct
  misc_feature 1..21: note = Synthetic
  source 1..21: mol_type = other RNA
gagggggttccttcaagaagc

SEQ ID NO: 8609 - RNA, 21 nt, synthetic construct
  misc_feature 1..21: note = Synthetic
  source 1..21: mol_type = other RNA
agggggttccttcaagaagcc

SEQ ID NO: 8610 - RNA, 21 nt, synthetic construct
  misc_feature 1..21: note = Synthetic
  source 1..21: mol_type = other RNA
gggggttccttcaagaagcca

SEQ ID NO: 8611 - RNA, 21 nt, synthetic construct
  misc_feature 1..21: note = Synthetic
  source 1..21: mol_type = other RNA
ggggttccttcaagaagccag

SEQ ID NO: 8612 - RNA, 21 nt, synthetic construct
  misc_feature 1..21: note = Synthetic
  source 1..21: mol_type = other RNA
gggttccttcaagaagccaga

SEQ ID NO: 8613 - RNA, 21 nt, synthetic construct
  misc_feature 1..21: note = Synthetic
  source 1..21: mol_type = other RNA
ggttccttcaagaagccagag

SEQ ID NO: 8614 - RNA, 21 nt, synthetic construct
  misc_feature 1..21: note = Synthetic
  source 1..21: mol_type = other RNA
gttccttcaagaagccagagg

SEQ ID NO: 8615 - RNA, 21 nt, synthetic construct
  misc_feature 1..21: note = Synthetic
  source 1..21: mol_type = other RNA
ttccttcaagaagccagaggt

SEQ ID NO: 8616 - RNA, 21 nt, synthetic construct
  misc_feature 1..21: note = Synthetic
  source 1..21: mol_type = other RNA
tccttcaagaagccagaggtg

SEQ ID NO: 8617 - RNA, 21 nt, synthetic construct
  misc_feature 1..21: note = Synthetic
  source 1..21: mol_type = other RNA
ccttcaagaagccagaggtga

SEQ ID NO: 8618 - RNA, 21 nt, synthetic construct
  misc_feature 1..21: note = Synthetic
  source 1..21: mol_type = other RNA
cttcaagaagccagaggtgat

SEQ ID NO: 8619 - RNA, 21 nt, synthetic construct
  misc_feature 1..21: note = Synthetic
  source 1..21: mol_type = other RNA
ttcaagaagccagaggtgatt

SEQ ID NO: 8620 - RNA, 21 nt, synthetic construct
  misc_feature 1..21: note = Synthetic
  source 1..21: mol_type = other RNA
tcaagaagccagaggtgattt

SEQ ID NO: 8621 - RNA, 21 nt, synthetic construct
  misc_feature 1..21: note = Synthetic
  source 1..21: mol_type = other RNA
caagaagccagaggtgatttt

SEQ ID NO: 8622 - RNA, 21 nt, synthetic construct
  misc_feature 1..21: note = Synthetic
  source 1..21: mol_type = other RNA
aagaagccagaggtgattttc

SEQ ID NO: 8623 - RNA, 21 nt, synthetic construct
  misc_feature 1..21: note = Synthetic
  source 1..21: mol_type = other RNA
agaagccagaggtgattttct

SEQ ID NO: 8624 - RNA, 21 nt, synthetic construct
  misc_feature 1..21: note = Synthetic
  source 1..21: mol_type = other RNA
gaagccagaggtgattttctc

SEQ ID NO: 8625 - RNA, 21 nt, synthetic construct
  misc_feature 1..21: note = Synthetic
  source 1..21: mol_type = other RNA
aagccagaggtgattttctcc

SEQ ID NO: 8626 - RNA, 21 nt, synthetic construct
  misc_feature 1..21: note = Synthetic
  source 1..21: mol_type = other RNA
agccagaggtgattttctccc

SEQ ID NO: 8627 - RNA, 21 nt, synthetic construct
  misc_feature 1..21: note = Synthetic
  source 1..21: mol_type = other RNA
gccagaggtgattttctcccc

SEQ ID NO: 8628 - RNA, 21 nt, synthetic construct
  misc_feature 1..21: note = Synthetic
  source 1..21: mol_type = other RNA
ccagaggtgattttctccccc

SEQ ID NO: 8629 - RNA, 21 nt, synthetic construct
  misc_feature 1..21: note = Synthetic
  source 1..21: mol_type = other RNA
cagaggtgattttctccccca

SEQ ID NO: 8630 - RNA, 21 nt, synthetic construct
  misc_feature 1..21: note = Synthetic
  source 1..21: mol_type = other RNA
agaggtgattttctcccccag

SEQ ID NO: 8631 - RNA, 21 nt, synthetic construct
  misc_feature 1..21: note = Synthetic
  source 1..21: mol_type = other RNA
gaggtgattttctcccccaga

SEQ ID NO: 8632 - RNA, 21 nt, synthetic construct
  misc_feature 1..21: note = Synthetic
  source 1..21: mol_type = other RNA
aggtgattttctcccccagat

SEQ ID NO: 8633 - RNA, 21 nt, synthetic construct
  misc_feature 1..21: note = Synthetic
  source 1..21: mol_type = other RNA
ggtgattttctcccccagatc

SEQ ID NO: 8634 - RNA, 21 nt, synthetic construct
  misc_feature 1..21: note = Synthetic
  source 1..21: mol_type = other RNA
gtgattttctcccccagatct

SEQ ID NO: 8635 - RNA, 21 nt, synthetic construct
  misc_feature 1..21: note = Synthetic
  source 1..21: mol_type = other RNA
tgattttctcccccagatctc

SEQ ID NO: 8636 - RNA, 21 nt, synthetic construct
  misc_feature 1..21: note = Synthetic
  source 1..21: mol_type = other RNA
gattttctcccccagatctca

SEQ ID NO: 8637 - RNA, 21 nt, synthetic construct
  misc_feature 1..21: note = Synthetic
  source 1..21: mol_type = other RNA
attttctcccccagatctcag

SEQ ID NO: 8638 - RNA, 21 nt, synthetic construct
  misc_feature 1..21: note = Synthetic
  source 1..21: mol_type = other RNA
ttttctcccccagatctcagg

SEQ ID NO: 8639 - RNA, 21 nt, synthetic construct
  misc_feature 1..21: note = Synthetic
  source 1..21: mol_type = other RNA
tttctcccccagatctcaggc

SEQ ID NO: 8640 - RNA, 21 nt, synthetic construct
  misc_feature 1..21: note = Synthetic
  source 1..21: mol_type = other RNA
ttctcccccagatctcaggcc

SEQ ID NO: 8641 - RNA, 21 nt, synthetic construct
  misc_feature 1..21: note = Synthetic
  source 1..21: mol_type = other RNA
tctcccccagatctcaggcca

SEQ ID NO: 8642 - RNA, 21 nt, synthetic construct
  misc_feature 1..21: note = Synthetic
  source 1..21: mol_type = other RNA
ctcccccagatctcaggccaa

SEQ ID NO: 8643 - RNA, 21 nt, synthetic construct
  misc_feature 1..21: note = Synthetic
  source 1..21: mol_type = other RNA
tcccccagatctcaggccaac

SEQ ID NO: 8644 - RNA, 21 nt, synthetic construct
  misc_feature 1..21: note = Synthetic
  source 1..21: mol_type = other RNA
cccccagatctcaggccaact

SEQ ID NO: 8645 - RNA, 21 nt, synthetic construct
  misc_feature 1..21: note = Synthetic
  source 1..21: mol_type = other RNA
ccccagatctcaggccaactc

SEQ ID NO: 8646 - RNA, 21 nt, synthetic construct
  misc_feature 1..21: note = Synthetic
  source 1..21: mol_type = other RNA
cccagatctcaggccaactcc

SEQ ID NO: 8647 - RNA, 21 nt, synthetic construct
  misc_feature 1..21: note = Synthetic
  source 1..21: mol_type = other RNA
ccagatctcaggccaactcca

SEQ ID NO: 8648 - RNA, 21 nt, synthetic construct
  misc_feature 1..21: note = Synthetic
  source 1..21: mol_type = other RNA
cagatctcaggccaactccaa

SEQ ID NO: 8649 - RNA, 21 nt, synthetic construct
  misc_feature 1..21: note = Synthetic
  source 1..21: mol_type = other RNA
agatctcaggccaactccaaa

SEQ ID NO: 8650 - RNA, 21 nt, synthetic construct
  misc_feature 1..21: note = Synthetic
  source 1..21: mol_type = other RNA
gatctcaggccaactccaaat

SEQ ID NO: 8651 - RNA, 21 nt, synthetic construct
  misc_feature 1..21: note = Synthetic
  source 1..21: mol_type = other RNA
atctcaggccaactccaaatt

SEQ ID NO: 8652 - RNA, 21 nt, synthetic construct
  misc_feature 1..21: note = Synthetic
  source 1..21: mol_type = other RNA
tctcaggccaactccaaattg

SEQ ID NO: 8653 - RNA, 21 nt, synthetic construct
  misc_feature 1..21: note = Synthetic
  source 1..21: mol_type = other RNA
ctcaggccaactccaaattgt

SEQ ID NO: 8654 - RNA, 21 nt, synthetic construct
  misc_feature 1..21: note = Synthetic
  source 1..21: mol_type = other RNA
tcaggccaactccaaattgtg

SEQ ID NO: 8655 - RNA, 21 nt, synthetic construct
  misc_feature 1..21: note = Synthetic
  source 1..21: mol_type = other RNA
caggccaactccaaattgtgt

SEQ ID NO: 8656 - RNA, 21 nt, synthetic construct
  misc_feature 1..21: note = Synthetic
  source 1..21: mol_type = other RNA
aggccaactccaaattgtgtc

SEQ ID NO: 8657 - RNA, 21 nt, synthetic construct
  misc_feature 1..21: note = Synthetic
  source 1..21: mol_type = other RNA
ggccaactccaaattgtgtct

SEQ ID NO: 8658 - RNA, 21 nt, synthetic construct
  misc_feature 1..21: note = Synthetic
  source 1..21: mol_type = other RNA
gccaactccaaattgtgtctt

SEQ ID NO: 8659 - RNA, 21 nt, synthetic construct
  misc_feature 1..21: note = Synthetic
  source 1..21: mol_type = other RNA
ccaactccaaattgtgtcttc

SEQ ID NO: 8660 - RNA, 21 nt, synthetic construct
  misc_feature 1..21: note = Synthetic
  source 1..21: mol_type = other RNA
caactccaaattgtgtcttcc

SEQ ID NO: 8661 - RNA, 21 nt, synthetic construct
  misc_feature 1..21: note = Synthetic
  source 1..21: mol_type = other RNA
aactccaaattgtgtcttccc

SEQ ID NO: 8662 - RNA, 21 nt, synthetic construct
  misc_feature 1..21: note = Synthetic
  source 1..21: mol_type = other RNA
actccaaattgtgtcttcccc

SEQ ID NO: 8663 - RNA, 21 nt, synthetic construct
  misc_feature 1..21: note = Synthetic
  source 1..21: mol_type = other RNA
ctccaaattgtgtcttcccct

SEQ ID NO: 8664 - RNA, 21 nt, synthetic construct
  misc_feature 1..21: note = Synthetic
  source 1..21: mol_type = other RNA
tccaaattgtgtcttcccctg

SEQ ID NO: 8665 - RNA, 21 nt, synthetic construct
  misc_feature 1..21: note = Synthetic
  source 1..21: mol_type = other RNA
ccaaattgtgtcttcccctgc

SEQ ID NO: 8666 - RNA, 21 nt, synthetic construct
  misc_feature 1..21: note = Synthetic
  source 1..21: mol_type = other RNA
caaattgtgtcttcccctgct

SEQ ID NO: 8667 - RNA, 21 nt, synthetic construct
  misc_feature 1..21: note = Synthetic
  source 1..21: mol_type = other RNA
aaattgtgtcttcccctgctg

SEQ ID NO: 8668 - RNA, 21 nt, synthetic construct
  misc_feature 1..21: note = Synthetic
  source 1..21: mol_type = other RNA
aattgtgtcttcccctgctgg

SEQ ID NO: 8669 - RNA, 21 nt, synthetic construct
  misc_feature 1..21: note = Synthetic
  source 1..21: mol_type = other RNA
attgtgtcttcccctgctggc

SEQ ID NO: 8670 - RNA, 21 nt, synthetic construct
  misc_feature 1..21: note = Synthetic
  source 1..21: mol_type = other RNA
ttgtgtcttcccctgctggca

SEQ ID NO: 8671 - RNA, 21 nt, synthetic construct
  misc_feature 1..21: note = Synthetic
  source 1..21: mol_type = other RNA
tgtgtcttcccctgctggcac

SEQ ID NO: 8672 - RNA, 21 nt, synthetic construct
  misc_feature 1..21: note = Synthetic
  source 1..21: mol_type = other RNA
gtgtcttcccctgctggcacc

SEQ ID NO: 8673 - RNA, 21 nt, synthetic construct
  misc_feature 1..21: note = Synthetic
  source 1..21: mol_type = other RNA
tgtcttcccctgctggcacct

SEQ ID NO: 8674 - RNA, 21 nt, synthetic construct
  misc_feature 1..21: note = Synthetic
  source 1..21: mol_type = other RNA
gtcttcccctgctggcacctg

SEQ ID NO: 8675 - RNA, 21 nt, synthetic construct
  misc_feature 1..21: note = Synthetic
  source 1..21: mol_type = other RNA
tcttcccctgctggcacctgc

SEQ ID NO: 8676 - RNA, 21 nt, synthetic construct
  misc_feature 1..21: note = Synthetic
  source 1..21: mol_type = other RNA
cttcccctgctggcacctgct

SEQ ID NO: 8677 - RNA, 21 nt, synthetic construct
  misc_feature 1..21: note = Synthetic
  source 1..21: mol_type = other RNA
ttcccctgctggcacctgctc

SEQ ID NO: 8678 - RNA, 21 nt, synthetic construct
  misc_feature 1..21: note = Synthetic
  source 1..21: mol_type = other RNA
tcccctgctggcacctgctct

SEQ ID NO: 8679 - RNA, 21 nt, synthetic construct
  misc_feature 1..21: note = Synthetic
  source 1..21: mol_type = other RNA
cccctgctggcacctgctctc

SEQ ID NO: 8680 - RNA, 21 nt, synthetic construct
  misc_feature 1..21: note = Synthetic
  source 1..21: mol_type = other RNA
ccctgctggcacctgctctca

SEQ ID NO: 8681 - RNA, 21 nt, synthetic construct
  misc_feature 1..21: note = Synthetic
  source 1..21: mol_type = other RNA
cctgctggcacctgctctcac

SEQ ID NO: 8682 - RNA, 21 nt, synthetic construct
  misc_feature 1..21: note = Synthetic
  source 1..21: mol_type = other RNA
ctgctggcacctgctctcact

SEQ ID NO: 8683 - RNA, 21 nt, synthetic construct
  misc_feature 1..21: note = Synthetic
  source 1..21: mol_type = other RNA
tgctggcacctgctctcactg

SEQ ID NO: 8684 - RNA, 21 nt, synthetic construct
  misc_feature 1..21: note = Synthetic
  source 1..21: mol_type = other RNA
gctggcacctgctctcactgg

SEQ ID NO: 8685 - RNA, 21 nt, synthetic construct
  misc_feature 1..21: note = Synthetic
  source 1..21: mol_type = other RNA
ctggcacctgctctcactggc

SEQ ID NO: 8686 - RNA, 21 nt, synthetic construct
  misc_feature 1..21: note = Synthetic
  source 1..21: mol_type = other RNA
tggcacctgctctcactggca

SEQ ID NO: 8687 - RNA, 21 nt, synthetic construct
  misc_feature 1..21: note = Synthetic
  source 1..21: mol_type = other RNA
ggcacctgctctcactggcat

SEQ ID NO: 8688 - RNA, 21 nt, synthetic construct
  misc_feature 1..21: note = Synthetic
  source 1..21: mol_type = other RNA
gcacctgctctcactggcatc

SEQ ID NO: 8689 - RNA, 21 nt, synthetic construct
  misc_feature 1..21: note = Synthetic
  source 1..21: mol_type = other RNA
cacctgctctcactggcatct

SEQ ID NO: 8690 - RNA, 21 nt, synthetic construct
  misc_feature 1..21: note = Synthetic
  source 1..21: mol_type = other RNA
acctgctctcactggcatctg

SEQ ID NO: 8691 - RNA, 21 nt, synthetic construct
  misc_feature 1..21: note = Synthetic
  source 1..21: mol_type = other RNA
cctgctctcactggcatctgt

SEQ ID NO: 8692 - RNA, 21 nt, synthetic construct
  misc_feature 1..21: note = Synthetic
  source 1..21: mol_type = other RNA
ctgctctcactggcatctgtt

SEQ ID NO: 8693 - RNA, 21 nt, synthetic construct
  misc_feature 1..21: note = Synthetic
  source 1..21: mol_type = other RNA
tgctctcactggcatctgttg

SEQ ID NO: 8694 - RNA, 21 nt, synthetic construct
  misc_feature 1..21: note = Synthetic
  source 1..21: mol_type = other RNA
gctctcactggcatctgttga

SEQ ID NO: 8695 - RNA, 21 nt, synthetic construct
  misc_feature 1..21: note = Synthetic
  source 1..21: mol_type = other RNA
ctctcactggcatctgttgac

SEQ ID NO: 8696 - RNA, 21 nt, synthetic construct
  misc_feature 1..21: note = Synthetic
  source 1..21: mol_type = other RNA
tctcactggcatctgttgaca

SEQ ID NO: 8697 - RNA, 21 nt, synthetic construct
  misc_feature 1..21: note = Synthetic
  source 1..21: mol_type = other RNA
ctcactggcatctgttgacaa

SEQ ID NO: 8698 - RNA, 21 nt, synthetic construct
  misc_feature 1..21: note = Synthetic
  source 1..21: mol_type = other RNA
tcactggcatctgttgacaac

SEQ ID NO: 8699 - RNA, 21 nt, synthetic construct
  misc_feature 1..21: note = Synthetic
  source 1..21: mol_type = other RNA
cactggcatctgttgacaacc

SEQ ID NO: 8700 - RNA, 21 nt, synthetic construct
  misc_feature 1..21: note = Synthetic
  source 1..21: mol_type = other RNA
actggcatctgttgacaacca

SEQ ID NO: 8701 - RNA, 21 nt, synthetic construct
  misc_feature 1..21: note = Synthetic
  source 1..21: mol_type = other RNA
ctggcatctgttgacaaccac

SEQ ID NO: 8702 - RNA, 21 nt, synthetic construct
  misc_feature 1..21: note = Synthetic
  source 1..21: mol_type = other RNA
tggcatctgttgacaaccaca

SEQ ID NO: 8703 - RNA, 21 nt, synthetic construct
  misc_feature 1..21: note = Synthetic
  source 1..21: mol_type = other RNA
ggcatctgttgacaaccacag

SEQ ID NO: 8704 - RNA, 21 nt, synthetic construct
  misc_feature 1..21: note = Synthetic
  source 1..21: mol_type = other RNA
gcatctgttgacaaccacaga

SEQ ID NO: 8705 - RNA, 21 nt, synthetic construct
  misc_feature 1..21: note = Synthetic
  source 1..21: mol_type = other RNA
catctgttgacaaccacagaa

SEQ ID NO: 8706 - RNA, 21 nt, synthetic construct
  misc_feature 1..21: note = Synthetic
  source 1..21: mol_type = other RNA
atctgttgacaaccacagaac

SEQ ID NO: 8707 - RNA, 21 nt, synthetic construct
  misc_feature 1..21: note = Synthetic
  source 1..21: mol_type = other RNA
tctgttgacaaccacagaacg

SEQ ID NO: 8708 - RNA, 21 nt, synthetic construct
  misc_feature 1..21: note = Synthetic
  source 1..21: mol_type = other RNA
ctgttgacaaccacagaacgc

SEQ ID NO: 8709 - RNA, 21 nt, synthetic construct
  misc_feature 1..21: note = Synthetic
  source 1..21: mol_type = other RNA
tgttgacaaccacagaacgct

SEQ ID NO: 8710 - RNA, 21 nt, synthetic construct
  misc_feature 1..21: note = Synthetic
  source 1..21: mol_type = other RNA
gttgacaaccacagaacgctg

SEQ ID NO: 8711 - RNA, 21 nt, synthetic construct
  misc_feature 1..21: note = Synthetic
  source 1..21: mol_type = other RNA
ttgacaaccacagaacgctga

SEQ ID NO: 8712 - RNA, 21 nt, synthetic construct
  misc_feature 1..21: note = Synthetic
  source 1..21: mol_type = other RNA
tgacaaccacagaacgctgaa

SEQ ID NO: 8713 - RNA, 21 nt, synthetic construct
  misc_feature 1..21: note = Synthetic
  source 1..21: mol_type = other RNA
gacaaccacagaacgctgaag

SEQ ID NO: 8714 - RNA, 21 nt, synthetic construct
  misc_feature 1..21: note = Synthetic
  source 1..21: mol_type = other RNA
acaaccacagaacgctgaagc

SEQ ID NO: 8715 - RNA, 21 nt, synthetic construct
  misc_feature 1..21: note = Synthetic
  source 1..21: mol_type = other RNA
caaccacagaacgctgaagca

SEQ ID NO: 8716 - RNA, 21 nt, synthetic construct
  misc_feature 1..21: note = Synthetic
  source 1..21: mol_type = other RNA
aaccacagaacgctgaagcaa

SEQ ID NO: 8717 - RNA, 21 nt, synthetic construct
  misc_feature 1..21: note = Synthetic
  source 1..21: mol_type = other RNA
accacagaacgctgaagcaaa

SEQ ID NO: 8718 - RNA, 21 nt, synthetic construct
  misc_feature 1..21: note = Synthetic
  source 1..21: mol_type = other RNA
ccacagaacgctgaagcaaaa

SEQ ID NO: 8719 - RNA, 21 nt, synthetic construct
  misc_feature 1..21: note = Synthetic
  source 1..21: mol_type = other RNA
cacagaacgctgaagcaaaag

SEQ ID NO: 8720 - RNA, 21 nt, synthetic construct
  misc_feature 1..21: note = Synthetic
  source 1..21: mol_type = other RNA
acagaacgctgaagcaaaagc

SEQ ID NO: 8721 - RNA, 21 nt, synthetic construct
  misc_feature 1..21: note = Synthetic
  source 1..21: mol_type = other RNA
cagaacgctgaagcaaaagca

SEQ ID NO: 8722 - RNA, 21 nt, synthetic construct
  misc_feature 1..21: note = Synthetic
  source 1..21: mol_type = other RNA
agaacgctgaagcaaaagcaa

SEQ ID NO: 8723 - RNA, 21 nt, synthetic construct
  misc_feature 1..21: note = Synthetic
  source 1..21: mol_type = other RNA
gaacgctgaagcaaaagcaag

SEQ ID NO: 8724 - RNA, 21 nt, synthetic construct
  misc_feature 1..21: note = Synthetic
  source 1..21: mol_type = other RNA
aacgctgaagcaaaagcaagt

SEQ ID NO: 8725 - RNA, 21 nt, synthetic construct
  misc_feature 1..21: note = Synthetic
  source 1..21: mol_type = other RNA
acgctgaagcaaaagcaagta

SEQ ID NO: 8726 - RNA, 21 nt, synthetic construct
  misc_feature 1..21: note = Synthetic
  source 1..21: mol_type = other RNA
cgctgaagcaaaagcaagtat

SEQ ID NO: 8727 - RNA, 21 nt, synthetic construct
  misc_feature 1..21: note = Synthetic
  source 1..21: mol_type = other RNA
gctgaagcaaaagcaagtata

SEQ ID NO: 8728 - RNA, 21 nt, synthetic construct
  misc_feature 1..21: note = Synthetic
  source 1..21: mol_type = other RNA
ctgaagcaaaagcaagtataa

SEQ ID NO: 8729 - RNA, 21 nt, synthetic construct
  misc_feature 1..21: note = Synthetic
  source 1..21: mol_type = other RNA
tgaagcaaaagcaagtataaa

SEQ ID NO: 8730 - RNA, 21 nt, synthetic construct
  misc_feature 1..21: note = Synthetic
  source 1..21: mol_type = other RNA
gaagcaaaagcaagtataaaa

SEQ ID NO: 8731 - RNA, 21 nt, synthetic construct
  misc_feature 1..21: note = Synthetic
  source 1..21: mol_type = other RNA
aagcaaaagcaagtataaaac

SEQ ID NO: 8732 - RNA, 21 nt, synthetic construct
  misc_feature 1..21: note = Synthetic
  source 1..21: mol_type = other RNA
agcaaaagcaagtataaaaca

SEQ ID NO: 8733 - RNA, 21 nt, synthetic construct
  misc_feature 1..21: note = Synthetic
  source 1..21: mol_type = other RNA
gcaaaagcaagtataaaacag

SEQ ID NO: 8734 - RNA, 21 nt, synthetic construct
  misc_feature 1..21: note = Synthetic
  source 1..21: mol_type = other RNA
caaaagcaagtataaaacagg

SEQ ID NO: 8735 - RNA, 21 nt, synthetic construct
  misc_feature 1..21: note = Synthetic
  source 1..21: mol_type = other RNA
aaaagcaagtataaaacaggt

SEQ ID NO: 8736 - RNA, 21 nt, synthetic construct
  misc_feature 1..21: note = Synthetic
  source 1..21: mol_type = other RNA
aaagcaagtataaaacaggta

SEQ ID NO: 8737 - RNA, 21 nt, synthetic construct
  misc_feature 1..21: note = Synthetic
  source 1..21: mol_type = other RNA
aagcaagtataaaacaggtac

SEQ ID NO: 8738 - RNA, 21 nt, synthetic construct
  misc_feature 1..21: note = Synthetic
  source 1..21: mol_type = other RNA
agcaagtataaaacaggtaca

SEQ ID NO: 8739 - RNA, 21 nt, synthetic construct
  misc_feature 1..21: note = Synthetic
  source 1..21: mol_type = other RNA
gcaagtataaaacaggtacag

SEQ ID NO: 8740 - RNA, 21 nt, synthetic construct
  misc_feature 1..21: note = Synthetic
  source 1..21: mol_type = other RNA
caagtataaaacaggtacagg

SEQ ID NO: 8741 - RNA, 21 nt, synthetic construct
  misc_feature 1..21: note = Synthetic
  source 1..21: mol_type = other RNA
aagtataaaacaggtacaggc

SEQ ID NO: 8742 - RNA, 21 nt, synthetic construct
  misc_feature 1..21: note = Synthetic
  source 1..21: mol_type = other RNA
agtataaaacaggtacaggct

SEQ ID NO: 8743 - RNA, 21 nt, synthetic construct
  misc_feature 1..21: note = Synthetic
  source 1..21: mol_type = other RNA
gtataaaacaggtacaggctt

SEQ ID NO: 8744 - RNA, 21 nt, synthetic construct
  misc_feature 1..21: note = Synthetic
  source 1..21: mol_type = other RNA
tataaaacaggtacaggcttc

SEQ ID NO: 8745 - RNA, 21 nt, synthetic construct
  misc_feature 1..21: note = Synthetic
  source 1..21: mol_type = other RNA
ataaaacaggtacaggcttct

SEQ ID NO: 8746 - RNA, 21 nt, synthetic construct
  misc_feature 1..21: note = Synthetic
  source 1..21: mol_type = other RNA
taaaacaggtacaggcttctc

SEQ ID NO: 8747 - RNA, 21 nt, synthetic construct
  misc_feature 1..21: note = Synthetic
  source 1..21: mol_type = other RNA
aaaacaggtacaggcttctca

SEQ ID NO: 8748 - RNA, 21 nt, synthetic construct
  misc_feature 1..21: note = Synthetic
  source 1..21: mol_type = other RNA
aaacaggtacaggcttctcaa

SEQ ID NO: 8749 - RNA, 21 nt, synthetic construct
  misc_feature 1..21: note = Synthetic
  source 1..21: mol_type = other RNA
aacaggtacaggcttctcaac

SEQ ID NO: 8750 - RNA, 21 nt, synthetic construct
  misc_feature 1..21: note = Synthetic
  source 1..21: mol_type = other RNA
acaggtacaggcttctcaacc

SEQ ID NO: 8751 - RNA, 21 nt, synthetic construct
  misc_feature 1..21: note = Synthetic
  source 1..21: mol_type = other RNA
caggtacaggcttctcaacca

SEQ ID NO: 8752 - RNA, 21 nt, synthetic construct
  misc_feature 1..21: note = Synthetic
  source 1..21: mol_type = other RNA
aggtacaggcttctcaaccac

SEQ ID NO: 8753 - RNA, 21 nt, synthetic construct
  misc_feature 1..21: note = Synthetic
  source 1..21: mol_type = other RNA
ggtacaggcttctcaaccact

SEQ ID NO: 8754 - RNA, 21 nt, synthetic construct
  misc_feature 1..21: note = Synthetic
  source 1..21: mol_type = other RNA
gtacaggcttctcaaccactt

SEQ ID NO: 8755 - RNA, 21 nt, synthetic construct
  misc_feature 1..21: note = Synthetic
  source 1..21: mol_type = other RNA
tacaggcttctcaaccacttc

SEQ ID NO: 8756 - RNA, 21 nt, synthetic construct
  misc_feature 1..21: note = Synthetic
  source 1..21: mol_type = other RNA
acaggcttctcaaccacttcg

SEQ ID NO: 8757 - RNA, 21 nt, synthetic construct
  misc_feature 1..21: note = Synthetic
  source 1..21: mol_type = other RNA
caggcttctcaaccacttcgc

SEQ ID NO: 8758 - RNA, 21 nt, synthetic construct
  misc_feature 1..21: note = Synthetic
  source 1..21: mol_type = other RNA
aggcttctcaaccacttcgca

SEQ ID NO: 8759 - RNA, 21 nt, synthetic construct
  misc_feature 1..21: note = Synthetic
  source 1..21: mol_type = other RNA
ggcttctcaaccacttcgcag

SEQ ID NO: 8760 - RNA, 21 nt, synthetic construct
  misc_feature 1..21: note = Synthetic
  source 1..21: mol_type = other RNA
gcttctcaaccacttcgcaga

SEQ ID NO: 8761 - RNA, 21 nt, synthetic construct
  misc_feature 1..21: note = Synthetic
  source 1..21: mol_type = other RNA
cttctcaaccacttcgcagat

SEQ ID NO: 8762 - RNA, 21 nt, synthetic construct
  misc_feature 1..21: note = Synthetic
  source 1..21: mol_type = other RNA
ttctcaaccacttcgcagatg

SEQ ID NO: 8763 - RNA, 21 nt, synthetic construct
  misc_feature 1..21: note = Synthetic
  source 1..21: mol_type = other RNA
tctcaaccacttcgcagatgt

SEQ ID NO: 8764 - RNA, 21 nt, synthetic construct
  misc_feature 1..21: note = Synthetic
  source 1..21: mol_type = other RNA
ctcaaccacttcgcagatgtc

SEQ ID NO: 8765 - RNA, 21 nt, synthetic construct
  misc_feature 1..21: note = Synthetic
  source 1..21: mol_type = other RNA
tcaaccacttcgcagatgtct

SEQ ID NO: 8766 - RNA, 21 nt, synthetic construct
  misc_feature 1..21: note = Synthetic
  source 1..21: mol_type = other RNA
caaccacttcgcagatgtctg

SEQ ID NO: 8767 - RNA, 21 nt, synthetic construct
  misc_feature 1..21: note = Synthetic
  source 1..21: mol_type = other RNA
aaccacttcgcagatgtctgc

SEQ ID NO: 8768 - RNA, 21 nt, synthetic construct
  misc_feature 1..21: note = Synthetic
  source 1..21: mol_type = other RNA
accacttcgcagatgtctgcc

SEQ ID NO: 8769 - RNA, 21 nt, synthetic construct
  misc_feature 1..21: note = Synthetic
  source 1..21: mol_type = other RNA
ccacttcgcagatgtctgcca

SEQ ID NO: 8770 - RNA, 21 nt, synthetic construct
  misc_feature 1..21: note = Synthetic
  source 1..21: mol_type = other RNA
cacttcgcagatgtctgccaa

SEQ ID NO: 8771 - RNA, 21 nt, synthetic construct
  misc_feature 1..21: note = Synthetic
  source 1..21: mol_type = other RNA
acttcgcagatgtctgccaat

SEQ ID NO: 8772 - RNA, 21 nt, synthetic construct
  misc_feature 1..21: note = Synthetic
  source 1..21: mol_type = other RNA
cttcgcagatgtctgccaata

SEQ ID NO: 8773 - RNA, 21 nt, synthetic construct
  misc_feature 1..21: note = Synthetic
  source 1..21: mol_type = other RNA
ttcgcagatgtctgccaataa

SEQ ID NO: 8774 - RNA, 21 nt, synthetic construct
  misc_feature 1..21: note = Synthetic
  source 1..21: mol_type = other RNA
tcgcagatgtctgccaataat

SEQ ID NO: 8775 - RNA, 21 nt, synthetic construct
  misc_feature 1..21: note = Synthetic
  source 1..21: mol_type = other RNA
cgcagatgtctgccaataata

SEQ ID NO: 8776 - RNA, 21 nt, synthetic construct
  misc_feature 1..21: note = Synthetic
  source 1..21: mol_type = other RNA
gcagatgtctgccaataatat

SEQ ID NO: 8777 - RNA, 21 nt, synthetic construct
  misc_feature 1..21: note = Synthetic
  source 1..21: mol_type = other RNA
cagatgtctgccaataatatc

SEQ ID NO: 8778 - RNA, 21 nt, synthetic construct
  misc_feature 1..21: note = Synthetic
  source 1..21: mol_type = other RNA
agatgtctgccaataatatcc

SEQ ID NO: 8779 - RNA, 21 nt, synthetic construct
  misc_feature 1..21: note = Synthetic
  source 1..21: mol_type = other RNA
gatgtctgccaataatatcct

SEQ ID NO: 8780 - RNA, 21 nt, synthetic construct
  misc_feature 1..21: note = Synthetic
  source 1..21: mol_type = other RNA
atgtctgccaataatatcctg

SEQ ID NO: 8781 - RNA, 21 nt, synthetic construct
  misc_feature 1..21: note = Synthetic
  source 1..21: mol_type = other RNA
tgtctgccaataatatcctga

SEQ ID NO: 8782 - RNA, 21 nt, synthetic construct
  misc_feature 1..21: note = Synthetic
  source 1..21: mol_type = other RNA
gtctgccaataatatcctgat

SEQ ID NO: 8783 - RNA, 21 nt, synthetic construct
  misc_feature 1..21: note = Synthetic
  source 1..21: mol_type = other RNA
tctgccaataatatcctgata

SEQ ID NO: 8784 - RNA, 21 nt, synthetic construct
  misc_feature 1..21: note = Synthetic
  source 1..21: mol_type = other RNA
ctgccaataatatcctgataa

SEQ ID NO: 8785 - RNA, 21 nt, synthetic construct
  misc_feature 1..21: note = Synthetic
  source 1..21: mol_type = other RNA
tgccaataatatcctgataaa

SEQ ID NO: 8786 - RNA, 21 nt, synthetic construct
  misc_feature 1..21: note = Synthetic
  source 1..21: mol_type = other RNA
gccaataatatcctgataaaa

SEQ ID NO: 8787 - RNA, 21 nt, synthetic construct
  misc_feature 1..21: note = Synthetic
  source 1..21: mol_type = other RNA
ccaataatatcctgataaaat

SEQ ID NO: 8788 - RNA, 21 nt, synthetic construct
  misc_feature 1..21: note = Synthetic
  source 1..21: mol_type = other RNA
caataatatcctgataaaatc

SEQ ID NO: 8789 - RNA, 21 nt, synthetic construct
  misc_feature 1..21: note = Synthetic
  source 1..21: mol_type = other RNA
aataatatcctgataaaatcc

SEQ ID NO: 8790 - RNA, 21 nt, synthetic construct
  misc_feature 1..21: note = Synthetic
  source 1..21: mol_type = other RNA
ataatatcctgataaaatcca

SEQ ID NO: 8791 - RNA, 21 nt, synthetic construct
  misc_feature 1..21: note = Synthetic
  source 1..21: mol_type = other RNA
taatatcctgataaaatccag

SEQ ID NO: 8792 - RNA, 21 nt, synthetic construct
  misc_feature 1..21: note = Synthetic
  source 1..21: mol_type = other RNA
aatatcctgataaaatccagg

SEQ ID NO: 8793 - RNA, 21 nt, synthetic construct
  misc_feature 1..21: note = Synthetic
  source 1..21: mol_type = other RNA
atatcctgataaaatccagga

SEQ ID NO: 8794 - RNA, 21 nt, synthetic construct
  misc_feature 1..21: note = Synthetic
  source 1..21: mol_type = other RNA
tatcctgataaaatccaggaa

SEQ ID NO: 8795 - RNA, 21 nt, synthetic construct
  misc_feature 1..21: note = Synthetic
  source 1..21: mol_type = other RNA
atcctgataaaatccaggaag

SEQ ID NO: 8796 - RNA, 21 nt, synthetic construct
  misc_feature 1..21: note = Synthetic
  source 1..21: mol_type = other RNA
tcctgataaaatccaggaagc

SEQ ID NO: 8797 - RNA, 21 nt, synthetic construct
  misc_feature 1..21: note = Synthetic
  source 1..21: mol_type = other RNA
cctgataaaatccaggaagca

SEQ ID NO: 8798 - RNA, 21 nt, synthetic construct
  misc_feature 1..21: note = Synthetic
  source 1..21: mol_type = other RNA
ctgataaaatccaggaagcag

SEQ ID NO: 8799 - RNA, 21 nt, synthetic construct
  misc_feature 1..21: note = Synthetic
  source 1..21: mol_type = other RNA
tgataaaatccaggaagcagg

SEQ ID NO: 8800 - RNA, 21 nt, synthetic construct
  misc_feature 1..21: note = Synthetic
  source 1..21: mol_type = other RNA
gataaaatccaggaagcagga

SEQ ID NO: 8801 - RNA, 21 nt, synthetic construct
  misc_feature 1..21: note = Synthetic
  source 1..21: mol_type = other RNA
ataaaatccaggaagcaggat

SEQ ID NO: 8802 - RNA, 21 nt, synthetic construct
  misc_feature 1..21: note = Synthetic
  source 1..21: mol_type = other RNA
taaaatccaggaagcaggatt

SEQ ID NO: 8803 - RNA, 21 nt, synthetic construct
  misc_feature 1..21: note = Synthetic
  source 1..21: mol_type = other RNA
aaaatccaggaagcaggattt

SEQ ID NO: 8804 - RNA, 21 nt, synthetic construct
  misc_feature 1..21: note = Synthetic
  source 1..21: mol_type = other RNA
aaatccaggaagcaggatttg

SEQ ID NO: 8805 - RNA, 21 nt, synthetic construct
  misc_feature 1..21: note = Synthetic
  source 1..21: mol_type = other RNA
aatccaggaagcaggatttgg

SEQ ID NO: 8806 - RNA, 21 nt, synthetic construct
  misc_feature 1..21: note = Synthetic
  source 1..21: mol_type = other RNA
atccaggaagcaggatttggc

SEQ ID NO: 8807 - RNA, 21 nt, synthetic construct
  misc_feature 1..21: note = Synthetic
  source 1..21: mol_type = other RNA
tccaggaagcaggatttggct

SEQ ID NO: 8808 - RNA, 21 nt, synthetic construct
  misc_feature 1..21: note = Synthetic
  source 1..21: mol_type = other RNA
ccaggaagcaggatttggctt

SEQ ID NO: 8809 - RNA, 21 nt, synthetic construct
  misc_feature 1..21: note = Synthetic
  source 1..21: mol_type = other RNA
caggaagcaggatttggcttg

SEQ ID NO: 8810 - RNA, 21 nt, synthetic construct
  misc_feature 1..21: note = Synthetic
  source 1..21: mol_type = other RNA
aggaagcaggatttggcttga

SEQ ID NO: 8811 - RNA, 21 nt, synthetic construct
  misc_feature 1..21: note = Synthetic
  source 1..21: mol_type = other RNA
ggaagcaggatttggcttgac

SEQ ID NO: 8812 - RNA, 21 nt, synthetic construct
  misc_feature 1..21: note = Synthetic
  source 1..21: mol_type = other RNA
gaagcaggatttggcttgact

SEQ ID NO: 8813 - RNA, 21 nt, synthetic construct
  misc_feature 1..21: note = Synthetic
  source 1..21: mol_type = other RNA
aagcaggatttggcttgactc

SEQ ID NO: 8814 - RNA, 21 nt, synthetic construct
  misc_feature 1..21: note = Synthetic
  source 1..21: mol_type = other RNA
agcaggatttggcttgactcc

SEQ ID NO: 8815 - RNA, 21 nt, synthetic construct
  misc_feature 1..21: note = Synthetic
  source 1..21: mol_type = other RNA
gcaggatttggcttgactccc

SEQ ID NO: 8816 - RNA, 21 nt, synthetic construct
  misc_feature 1..21: note = Synthetic
  source 1..21: mol_type = other RNA
caggatttggcttgactccca

SEQ ID NO: 8817 - RNA, 21 nt, synthetic construct
  misc_feature 1..21: note = Synthetic
  source 1..21: mol_type = other RNA
aggatttggcttgactcccag

SEQ ID NO: 8818 - RNA, 21 nt, synthetic construct
  misc_feature 1..21: note = Synthetic
  source 1..21: mol_type = other RNA
ggatttggcttgactcccagc

SEQ ID NO: 8819 - RNA, 21 nt, synthetic construct
  misc_feature 1..21: note = Synthetic
  source 1..21: mol_type = other RNA
gatttggcttgactcccagcc

SEQ ID NO: 8820 - RNA, 21 nt, synthetic construct
  misc_feature 1..21: note = Synthetic
  source 1..21: mol_type = other RNA
atttggcttgactcccagcct

SEQ ID NO: 8821 - RNA, 21 nt, synthetic construct
  misc_feature 1..21: note = Synthetic
  source 1..21: mol_type = other RNA
tttggcttgactcccagcctc

SEQ ID NO: 8822 - RNA, 21 nt, synthetic construct
  misc_feature 1..21: note = Synthetic
  source 1..21: mol_type = other RNA
ttggcttgactcccagcctct

SEQ ID NO: 8823 - RNA, 21 nt, synthetic construct
  misc_feature 1..21: note = Synthetic
  source 1..21: mol_type = other RNA
tggcttgactcccagcctctt

SEQ ID NO: 8824 - RNA, 21 nt, synthetic construct
  misc_feature 1..21: note = Synthetic
  source 1..21: mol_type = other RNA
ggcttgactcccagcctcttc

SEQ ID NO: 8825 - RNA, 21 nt, synthetic construct
  misc_feature 1..21: note = Synthetic
  source 1..21: mol_type = other RNA
gcttgactcccagcctcttct

SEQ ID NO: 8826 - RNA, 21 nt, synthetic construct
  misc_feature 1..21: note = Synthetic
  source 1..21: mol_type = other RNA
cttgactcccagcctcttctc

SEQ ID NO: 8827 - RNA, 21 nt, synthetic construct
  misc_feature 1..21: note = Synthetic
  source 1..21: mol_type = other RNA
ttgactcccagcctcttctcc

SEQ ID NO: 8828 - RNA, 21 nt, synthetic construct
  misc_feature 1..21: note = Synthetic
  source 1..21: mol_type = other RNA
tgactcccagcctcttctcca

SEQ ID NO: 8829 - RNA, 21 nt, synthetic construct
  misc_feature 1..21: note = Synthetic
  source 1..21: mol_type = other RNA
gactcccagcctcttctccat

SEQ ID NO: 8830 - RNA, 21 nt, synthetic construct
  misc_feature 1..21: note = Synthetic
  source 1..21: mol_type = other RNA
actcccagcctcttctccatg

SEQ ID NO: 8831 - RNA, 21 nt, synthetic construct
  misc_feature 1..21: note = Synthetic
  source 1..21: mol_type = other RNA
ctcccagcctcttctccatgg

SEQ ID NO: 8832 - RNA, 21 nt, synthetic construct
  misc_feature 1..21: note = Synthetic
  source 1..21: mol_type = other RNA
tcccagcctcttctccatggc

SEQ ID NO: 8833 - RNA, 21 nt, synthetic construct
  misc_feature 1..21: note = Synthetic
  source 1..21: mol_type = other RNA
cccagcctcttctccatggcc

SEQ ID NO: 8834 - RNA, 21 nt, synthetic construct
  misc_feature 1..21: note = Synthetic
  source 1..21: mol_type = other RNA
ccagcctcttctccatggccc

SEQ ID NO: 8835 - RNA, 21 nt, synthetic construct
  misc_feature 1..21: note = Synthetic
  source 1..21: mol_type = other RNA
cagcctcttctccatggccct

SEQ ID NO: 8836 - RNA, 21 nt, synthetic construct
  misc_feature 1..21: note = Synthetic
  source 1..21: mol_type = other RNA
agcctcttctccatggccctc

SEQ ID NO: 8837 - RNA, 21 nt, synthetic construct
  misc_feature 1..21: note = Synthetic
  source 1..21: mol_type = other RNA
gcctcttctccatggccctcc

SEQ ID NO: 8838 - RNA, 21 nt, synthetic construct
  misc_feature 1..21: note = Synthetic
  source 1..21: mol_type = other RNA
cctcttctccatggccctcca

SEQ ID NO: 8839 - RNA, 21 nt, synthetic construct
  misc_feature 1..21: note = Synthetic
  source 1..21: mol_type = other RNA
ctcttctccatggccctccag

SEQ ID NO: 8840 - RNA, 21 nt, synthetic construct
  misc_feature 1..21: note = Synthetic
  source 1..21: mol_type = other RNA
tcttctccatggccctccaga

SEQ ID NO: 8841 - RNA, 21 nt, synthetic construct
  misc_feature 1..21: note = Synthetic
  source 1..21: mol_type = other RNA
cttctccatggccctccagac

SEQ ID NO: 8842 - RNA, 21 nt, synthetic construct
  misc_feature 1..21: note = Synthetic
  source 1..21: mol_type = other RNA
ttctccatggccctccagaca

SEQ ID NO: 8843 - RNA, 21 nt, synthetic construct
  misc_feature 1..21: note = Synthetic
  source 1..21: mol_type = other RNA
tctccatggccctccagacag

SEQ ID NO: 8844 - RNA, 21 nt, synthetic construct
  misc_feature 1..21: note = Synthetic
  source 1..21: mol_type = other RNA
ctccatggccctccagacagg

SEQ ID NO: 8845 - RNA, 21 nt, synthetic construct
  misc_feature 1..21: note = Synthetic
  source 1..21: mol_type = other RNA
tccatggccctccagacaggc

SEQ ID NO: 8846 - RNA, 21 nt, synthetic construct
  misc_feature 1..21: note = Synthetic
  source 1..21: mol_type = other RNA
ccatggccctccagacaggca

SEQ ID NO: 8847 - RNA, 21 nt, synthetic construct
  misc_feature 1..21: note = Synthetic
  source 1..21: mol_type = other RNA
catggccctccagacaggcag

SEQ ID NO: 8848 - RNA, 21 nt, synthetic construct
  misc_feature 1..21: note = Synthetic
  source 1..21: mol_type = other RNA
atggccctccagacaggcaga

SEQ ID NO: 8849 - RNA, 21 nt, synthetic construct
  misc_feature 1..21: note = Synthetic
  source 1..21: mol_type = other RNA
tggccctccagacaggcagaa

SEQ ID NO: 8850 - RNA, 21 nt, synthetic construct
  misc_feature 1..21: note = Synthetic
  source 1..21: mol_type = other RNA
ggccctccagacaggcagaac

SEQ ID NO: 8851 - RNA, 21 nt, synthetic construct
  misc_feature 1..21: note = Synthetic
  source 1..21: mol_type = other RNA
gccctccagacaggcagaacc

SEQ ID NO: 8852 - RNA, 21 nt, synthetic construct
  misc_feature 1..21: note = Synthetic
  source 1..21: mol_type = other RNA
ccctccagacaggcagaacca

SEQ ID NO: 8853 - RNA, 21 nt, synthetic construct
  misc_feature 1..21: note = Synthetic
  source 1..21: mol_type = other RNA
cctccagacaggcagaaccag

SEQ ID NO: 8854 - RNA, 21 nt, synthetic construct
  misc_feature 1..21: note = Synthetic
  source 1..21: mol_type = other RNA
ctccagacaggcagaaccagt

SEQ ID NO: 8855 - RNA, 21 nt, synthetic construct
  misc_feature 1..21: note = Synthetic
  source 1..21: mol_type = other RNA
tccagacaggcagaaccagta

SEQ ID NO: 8856 - RNA, 21 nt, synthetic construct
  misc_feature 1..21: note = Synthetic
  source 1..21: mol_type = other RNA
ccagacaggcagaaccagtac

SEQ ID NO: 8857 - RNA, 21 nt, synthetic construct
  misc_feature 1..21: note = Synthetic
  source 1..21: mol_type = other RNA
cagacaggcagaaccagtaca

SEQ ID NO: 8858 - RNA, 21 nt, synthetic construct
  misc_feature 1..21: note = Synthetic
  source 1..21: mol_type = other RNA
agacaggcagaaccagtacac

SEQ ID NO: 8859 - RNA, 21 nt, synthetic construct
  misc_feature 1..21: note = Synthetic
  source 1..21: mol_type = other RNA
gacaggcagaaccagtacacg

SEQ ID NO: 8860 - RNA, 21 nt, synthetic construct
  misc_feature 1..21: note = Synthetic
  source 1..21: mol_type = other RNA
acaggcagaaccagtacacgg

SEQ ID NO: 8861 - RNA, 21 nt, synthetic construct
  misc_feature 1..21: note = Synthetic
  source 1..21: mol_type = other RNA
caggcagaaccagtacacggg

SEQ ID NO: 8862 - RNA, 21 nt, synthetic construct
  misc_feature 1..21: note = Synthetic
  source 1..21: mol_type = other RNA
aggcagaaccagtacacgggg

SEQ ID NO: 8863 - RNA, 21 nt, synthetic construct
  misc_feature 1..21: note = Synthetic
  source 1..21: mol_type = other RNA
ggcagaaccagtacacggggc

SEQ ID NO: 8864 - RNA, 21 nt, synthetic construct
  misc_feature 1..21: note = Synthetic
  source 1..21: mol_type = other RNA
gcagaaccagtacacggggct

SEQ ID NO: 8865 - RNA, 21 nt, synthetic construct
  misc_feature 1..21: note = Synthetic
  source 1..21: mol_type = other RNA
cagaaccagtacacggggctc

SEQ ID NO: 8866 - RNA, 21 nt, synthetic construct
  misc_feature 1..21: note = Synthetic
  source 1..21: mol_type = other RNA
agaaccagtacacggggctca

SEQ ID NO: 8867 - RNA, 21 nt, synthetic construct
  misc_feature 1..21: note = Synthetic
  source 1..21: mol_type = other RNA
gaaccagtacacggggctcag

SEQ ID NO: 8868 - RNA, 21 nt, synthetic construct
  misc_feature 1..21: note = Synthetic
  source 1..21: mol_type = other RNA
aaccagtacacggggctcagg

SEQ ID NO: 8869 - RNA, 21 nt, synthetic construct
  misc_feature 1..21: note = Synthetic
  source 1..21: mol_type = other RNA
accagtacacggggctcaggg

SEQ ID NO: 8870 - RNA, 21 nt, synthetic construct
  misc_feature 1..21: note = Synthetic
  source 1..21: mol_type = other RNA
ccagtacacggggctcagggc

SEQ ID NO: 8871 - RNA, 21 nt, synthetic construct
  misc_feature 1..21: note = Synthetic
  source 1..21: mol_type = other RNA
cagtacacggggctcagggcc

SEQ ID NO: 8872 - RNA, 21 nt, synthetic construct
  misc_feature 1..21: note = Synthetic
  source 1..21: mol_type = other RNA
agtacacggggctcagggcca

SEQ ID NO: 8873 - RNA, 21 nt, synthetic construct
  misc_feature 1..21: note = Synthetic
  source 1..21: mol_type = other RNA
gtacacggggctcagggccac

SEQ ID NO: 8874 - RNA, 21 nt, synthetic construct
  misc_feature 1..21: note = Synthetic
  source 1..21: mol_type = other RNA
tacacggggctcagggccaca

SEQ ID NO: 8875 - RNA, 21 nt, synthetic construct
  misc_feature 1..21: note = Synthetic
  source 1..21: mol_type = other RNA
acacggggctcagggccacat

SEQ ID NO: 8876 - RNA, 21 nt, synthetic construct
  misc_feature 1..21: note = Synthetic
  source 1..21: mol_type = other RNA
cacggggctcagggccacata

SEQ ID NO: 8877 - RNA, 21 nt, synthetic construct
  misc_feature 1..21: note = Synthetic
  source 1..21: mol_type = other RNA
acggggctcagggccacatag

SEQ ID NO: 8878 - RNA, 21 nt, synthetic construct
  misc_feature 1..21: note = Synthetic
  source 1..21: mol_type = other RNA
cggggctcagggccacatagc

SEQ ID NO: 8879 - RNA, 21 nt, synthetic construct
  misc_feature 1..21: note = Synthetic
  source 1..21: mol_type = other RNA
ggggctcagggccacatagcg

SEQ ID NO: 8880 - RNA, 21 nt, synthetic construct
  misc_feature 1..21: note = Synthetic
  source 1..21: mol_type = other RNA
gggctcagggccacatagcgg

SEQ ID NO: 8881 - RNA, 21 nt, synthetic construct
  misc_feature 1..21: note = Synthetic
  source 1..21: mol_type = other RNA
ggctcagggccacatagcggg

SEQ ID NO: 8882 - RNA, 21 nt, synthetic construct
  misc_feature 1..21: note = Synthetic
  source 1..21: mol_type = other RNA
gctcagggccacatagcgggg

SEQ ID NO: 8883 - RNA, 21 nt, synthetic construct
  misc_feature 1..21: note = Synthetic
  source 1..21: mol_type = other RNA
ctcagggccacatagcggggc

SEQ ID NO: 8884 - RNA, 21 nt, synthetic construct
  misc_feature 1..21: note = Synthetic
  source 1..21: mol_type = other RNA
tcagggccacatagcggggcc

SEQ ID NO: 8885 - RNA, 21 nt, synthetic construct
  misc_feature 1..21: note = Synthetic
  source 1..21: mol_type = other RNA
cagggccacatagcggggccc

SEQ ID NO: 8886 - RNA, 21 nt, synthetic construct
  misc_feature 1..21: note = Synthetic
  source 1..21: mol_type = other RNA
agggccacatagcggggcccc

SEQ ID NO: 8887 - RNA, 21 nt, synthetic construct
  misc_feature 1..21: note = Synthetic
  source 1..21: mol_type = other RNA
gggccacatagcggggccccg

SEQ ID NO: 8888 - RNA, 21 nt, synthetic construct
  misc_feature 1..21: note = Synthetic
  source 1..21: mol_type = other RNA
ggccacatagcggggccccgg

SEQ ID NO: 8889 - RNA, 21 nt, synthetic construct
  misc_feature 1..21: note = Synthetic
  source 1..21: mol_type = other RNA
gccacatagcggggccccggc

SEQ ID NO: 8890 - RNA, 21 nt, synthetic construct
  misc_feature 1..21: note = Synthetic
  source 1..21: mol_type = other RNA
ccacatagcggggccccggct

SEQ ID NO: 8891 - RNA, 21 nt, synthetic construct
  misc_feature 1..21: note = Synthetic
  source 1..21: mol_type = other RNA
cacatagcggggccccggctc

SEQ ID NO: 8892 - RNA, 21 nt, synthetic construct
  misc_feature 1..21: note = Synthetic
  source 1..21: mol_type = other RNA
acatagcggggccccggctct

SEQ ID NO: 8893 - RNA, 21 nt, synthetic construct
  misc_feature 1..21: note = Synthetic
  source 1..21: mol_type = other RNA
catagcggggccccggctctc

SEQ ID NO: 8894 - RNA, 21 nt, synthetic construct
  misc_feature 1..21: note = Synthetic
  source 1..21: mol_type = other RNA
atagcggggccccggctctcg

SEQ ID NO: 8895 - RNA, 21 nt, synthetic construct
  misc_feature 1..21: note = Synthetic
  source 1..21: mol_type = other RNA
tagcggggccccggctctcgg

SEQ ID NO: 8896 - RNA, 21 nt, synthetic construct
  misc_feature 1..21: note = Synthetic
  source 1..21: mol_type = other RNA
agcggggccccggctctcggc

SEQ ID NO: 8897 - RNA, 21 nt, synthetic construct
  misc_feature 1..21: note = Synthetic
  source 1..21: mol_type = other RNA
gcggggccccggctctcggcg

SEQ ID NO: 8898 - RNA, 21 nt, synthetic construct
  misc_feature 1..21: note = Synthetic
  source 1..21: mol_type = other RNA
cggggccccggctctcggcgg

SEQ ID NO: 8899 - RNA, 21 nt, synthetic construct
  misc_feature 1..21: note = Synthetic
  source 1..21: mol_type = other RNA
ggggccccggctctcggcggc

SEQ ID NO: 8900 - RNA, 21 nt, synthetic construct
  misc_feature 1..21: note = Synthetic
  source 1..21: mol_type = other RNA
gggccccggctctcggcggcc

SEQ ID NO: 8901 - RNA, 21 nt, synthetic construct
  misc_feature 1..21: note = Synthetic
  source 1..21: mol_type = other RNA
ggccccggctctcggcggcct

SEQ ID NO: 8902 - RNA, 21 nt, synthetic construct
  misc_feature 1..21: note = Synthetic
  source 1..21: mol_type = other RNA
gccccggctctcggcggcctc

SEQ ID NO: 8903 - RNA, 21 nt, synthetic construct
  misc_feature 1..21: note = Synthetic
  source 1..21: mol_type = other RNA
ccccggctctcggcggcctcc

SEQ ID NO: 8904 - RNA, 21 nt, synthetic construct
  misc_feature 1..21: note = Synthetic
  source 1..21: mol_type = other RNA
cccggctctcggcggcctccg

SEQ ID NO: 8905 - RNA, 21 nt, synthetic construct
  misc_feature 1..21: note = Synthetic
  source 1..21: mol_type = other RNA
ccggctctcggcggcctccgc

SEQ ID NO: 8906 - RNA, 21 nt, synthetic construct
  misc_feature 1..21: note = Synthetic
  source 1..21: mol_type = other RNA
cggctctcggcggcctccgcc

SEQ ID NO: 8907 - RNA, 21 nt, synthetic construct
  misc_feature 1..21: note = Synthetic
  source 1..21: mol_type = other RNA
ggctctcggcggcctccgcct

SEQ ID NO: 8908 - RNA, 21 nt, synthetic construct
  misc_feature 1..21: note = Synthetic
  source 1..21: mol_type = other RNA
gctctcggcggcctccgcctc

SEQ ID NO: 8909 - RNA, 21 nt, synthetic construct
  misc_feature 1..21: note = Synthetic
  source 1..21: mol_type = other RNA
ctctcggcggcctccgcctcc

SEQ ID NO: 8910 - RNA, 21 nt, synthetic construct
  misc_feature 1..21: note = Synthetic
  source 1..21: mol_type = other RNA
tctcggcggcctccgcctcct

SEQ ID NO: 8911 - RNA, 21 nt, synthetic construct
  misc_feature 1..21: note = Synthetic
  source 1..21: mol_type = other RNA
ctcggcggcctccgcctcctc

SEQ ID NO: 8912 - RNA, 21 nt, synthetic construct
  misc_feature 1..21: note = Synthetic
  source 1..21: mol_type = other RNA
tcggcggcctccgcctcctcc

SEQ ID NO: 8913 - RNA, 21 nt, synthetic construct
  misc_feature 1..21: note = Synthetic
  source 1..21: mol_type = other RNA
cggcggcctccgcctcctcct

SEQ ID NO: 8914 - RNA, 21 nt, synthetic construct
  misc_feature 1..21: note = Synthetic
  source 1..21: mol_type = other RNA
ggcggcctccgcctcctcctg

SEQ ID NO: 8915 - RNA, 21 nt, synthetic construct
  misc_feature 1..21: note = Synthetic
  source 1..21: mol_type = other RNA
gcggcctccgcctcctcctgg

SEQ ID NO: 8916 - RNA, 21 nt, synthetic construct
  misc_feature 1..21: note = Synthetic
  source 1..21: mol_type = other RNA
cggcctccgcctcctcctggt

SEQ ID NO: 8917 - RNA, 21 nt, synthetic construct
  misc_feature 1..21: note = Synthetic
  source 1..21: mol_type = other RNA
ggcctccgcctcctcctggtc

SEQ ID NO: 8918 - RNA, 21 nt, synthetic construct
  misc_feature 1..21: note = Synthetic
  source 1..21: mol_type = other RNA
gcctccgcctcctcctggtcc

SEQ ID NO: 8919 - RNA, 21 nt, synthetic construct
  misc_feature 1..21: note = Synthetic
  source 1..21: mol_type = other RNA
cctccgcctcctcctggtcca

SEQ ID NO: 8920 - RNA, 21 nt, synthetic construct
  misc_feature 1..21: note = Synthetic
  source 1..21: mol_type = other RNA
ctccgcctcctcctggtccat

SEQ ID NO: 8921 - RNA, 21 nt, synthetic construct
  misc_feature 1..21: note = Synthetic
  source 1..21: mol_type = other RNA
tccgcctcctcctggtccatg

SEQ ID NO: 8922 - RNA, 21 nt, synthetic construct
  misc_feature 1..21: note = Synthetic
  source 1..21: mol_type = other RNA
ccgcctcctcctggtccatgg

SEQ ID NO: 8923 - RNA, 21 nt, synthetic construct
  misc_feature 1..21: note = Synthetic
  source 1..21: mol_type = other RNA
cgcctcctcctggtccatggg

SEQ ID NO: 8924 - RNA, 21 nt, synthetic construct
  misc_feature 1..21: note = Synthetic
  source 1..21: mol_type = other RNA
gcctcctcctggtccatgggc

SEQ ID NO: 8925 - RNA, 21 nt, synthetic construct
  misc_feature 1..21: note = Synthetic
  source 1..21: mol_type = other RNA
cctcctcctggtccatgggct

SEQ ID NO: 8926 - RNA, 21 nt, synthetic construct
  misc_feature 1..21: note = Synthetic
  source 1..21: mol_type = other RNA
ctcctcctggtccatgggctc

SEQ ID NO: 8927 - RNA, 21 nt, synthetic construct
  misc_feature 1..21: note = Synthetic
  source 1..21: mol_type = other RNA
tcctcctggtccatgggctcg

SEQ ID NO: 8928 - RNA, 21 nt, synthetic construct
  misc_feature 1..21: note = Synthetic
  source 1..21: mol_type = other RNA
cctcctggtccatgggctcgg

SEQ ID NO: 8929 - RNA, 21 nt, synthetic construct
  misc_feature 1..21: note = Synthetic
  source 1..21: mol_type = other RNA
ctcctggtccatgggctcggg

SEQ ID NO: 8930 - RNA, 21 nt, synthetic construct
  misc_feature 1..21: note = Synthetic
  source 1..21: mol_type = other RNA
tcctggtccatgggctcgggg

SEQ ID NO: 8931 - RNA, 21 nt, synthetic construct
  misc_feature 1..21: note = Synthetic
  source 1..21: mol_type = other RNA
cctggtccatgggctcgggga

SEQ ID NO: 8932 - RNA, 21 nt, synthetic construct
  misc_feature 1..21: note = Synthetic
  source 1..21: mol_type = other RNA
ctggtccatgggctcggggac

SEQ ID NO: 8933 - RNA, 21 nt, synthetic construct
  misc_feature 1..21: note = Synthetic
  source 1..21: mol_type = other RNA
tggtccatgggctcggggacc

SEQ ID NO: 8934 - RNA, 21 nt, synthetic construct
  misc_feature 1..21: note = Synthetic
  source 1..21: mol_type = other RNA
ggtccatgggctcggggaccc

SEQ ID NO: 8935 - RNA, 21 nt, synthetic construct
  misc_feature 1..21: note = Synthetic
  source 1..21: mol_type = other RNA
gtccatgggctcggggacccc

SEQ ID NO: 8936 - RNA, 21 nt, synthetic construct
  misc_feature 1..21: note = Synthetic
  source 1..21: mol_type = other RNA
tccatgggctcggggaccccc

SEQ ID NO: 8937 - RNA, 21 nt, synthetic construct
  misc_feature 1..21: note = Synthetic
  source 1..21: mol_type = other RNA
ccatgggctcggggaccccca

SEQ ID NO: 8938 - RNA, 21 nt, synthetic construct
  misc_feature 1..21: note = Synthetic
  source 1..21: mol_type = other RNA
catgggctcggggacccccaa

SEQ ID NO: 8939 - RNA, 21 nt, synthetic construct
  misc_feature 1..21: note = Synthetic
  source 1..21: mol_type = other RNA
atgggctcggggacccccaac

SEQ ID NO: 8940 - RNA, 21 nt, synthetic construct
  misc_feature 1..21: note = Synthetic
  source 1..21: mol_type = other RNA
tgggctcggggacccccaacc

SEQ ID NO: 8941 - RNA, 21 nt, synthetic construct
  misc_feature 1..21: note = Synthetic
  source 1..21: mol_type = other RNA
gggctcggggacccccaacct

SEQ ID NO: 8942 - RNA, 21 nt, synthetic construct
  misc_feature 1..21: note = Synthetic
  source 1..21: mol_type = other RNA
ggctcggggacccccaacctt

SEQ ID NO: 8943 - RNA, 21 nt, synthetic construct
  misc_feature 1..21: note = Synthetic
  source 1..21: mol_type = other RNA
gctcggggacccccaaccttc

SEQ ID NO: 8944 - RNA, 21 nt, synthetic construct
  misc_feature 1..21: note = Synthetic
  source 1..21: mol_type = other RNA
ctcggggacccccaaccttcg

SEQ ID NO: 8945 - RNA, 21 nt, synthetic construct
  misc_feature 1..21: note = Synthetic
  source 1..21: mol_type = other RNA
tcggggacccccaaccttcgc

SEQ ID NO: 8946 - RNA, 21 nt, synthetic construct
  misc_feature 1..21: note = Synthetic
  source 1..21: mol_type = other RNA
cggggacccccaaccttcgct

SEQ ID NO: 8947 - RNA, 21 nt, synthetic construct
  misc_feature 1..21: note = Synthetic
  source 1..21: mol_type = other RNA
ggggacccccaaccttcgctc

SEQ ID NO: 8948 - RNA, 21 nt, synthetic construct
  misc_feature 1..21: note = Synthetic
  source 1..21: mol_type = other RNA
gggacccccaaccttcgctcc

SEQ ID NO: 8949 - RNA, 21 nt, synthetic construct
  misc_feature 1..21: note = Synthetic
  source 1..21: mol_type = other RNA
ggacccccaaccttcgctccc

SEQ ID NO: 8950 - RNA, 21 nt, synthetic construct
  misc_feature 1..21: note = Synthetic
  source 1..21: mol_type = other RNA
gacccccaaccttcgctcccc

SEQ ID NO: 8951 - RNA, 21 nt, synthetic construct
  misc_feature 1..21: note = Synthetic
  source 1..21: mol_type = other RNA
acccccaaccttcgctcccct

SEQ ID NO: 8952 - RNA, 21 nt, synthetic construct
  misc_feature 1..21: note = Synthetic
  source 1..21: mol_type = other RNA
cccccaaccttcgctcccctc

SEQ ID NO: 8953 - RNA, 21 nt, synthetic construct
  misc_feature 1..21: note = Synthetic
  source 1..21: mol_type = other RNA
ccccaaccttcgctcccctca

SEQ ID NO: 8954 - RNA, 21 nt, synthetic construct
  misc_feature 1..21: note = Synthetic
  source 1..21: mol_type = other RNA
cccaaccttcgctcccctcac

SEQ ID NO: 8955 - RNA, 21 nt, synthetic construct
  misc_feature 1..21: note = Synthetic
  source 1..21: mol_type = other RNA
ccaaccttcgctcccctcacc

SEQ ID NO: 8956 - RNA, 21 nt, synthetic construct
  misc_feature 1..21: note = Synthetic
  source 1..21: mol_type = other RNA
caaccttcgctcccctcaccc

SEQ ID NO: 8957 - RNA, 21 nt, synthetic construct
  misc_feature 1..21: note = Synthetic
  source 1..21: mol_type = other RNA
aaccttcgctcccctcacccg

SEQ ID NO: 8958 - RNA, 21 nt, synthetic construct
  misc_feature 1..21: note = Synthetic
  source 1..21: mol_type = other RNA
accttcgctcccctcacccgg

SEQ ID NO: 8959 - RNA, 21 nt, synthetic construct
  misc_feature 1..21: note = Synthetic
  source 1..21: mol_type = other RNA
ccttcgctcccctcacccgga

SEQ ID NO: 8960 - RNA, 21 nt, synthetic construct
  misc_feature 1..21: note = Synthetic
  source 1..21: mol_type = other RNA
cttcgctcccctcacccggag

SEQ ID NO: 8961 - RNA, 21 nt, synthetic construct
  misc_feature 1..21: note = Synthetic
  source 1..21: mol_type = other RNA
ttcgctcccctcacccggagg

SEQ ID NO: 8962 - RNA, 21 nt, synthetic construct
  misc_feature 1..21: note = Synthetic
  source 1..21: mol_type = other RNA
tcgctcccctcacccggagga

SEQ ID NO: 8963 - RNA, 21 nt, synthetic construct
  misc_feature 1..21: note = Synthetic
  source 1..21: mol_type = other RNA
cgctcccctcacccggaggag

SEQ ID NO: 8964 - RNA, 21 nt, synthetic construct
  misc_feature 1..21: note = Synthetic
  source 1..21: mol_type = other RNA
gctcccctcacccggaggagg

SEQ ID NO: 8965 - RNA, 21 nt, synthetic construct
  misc_feature 1..21: note = Synthetic
  source 1..21: mol_type = other RNA
ctcccctcacccggaggagga

SEQ ID NO: 8966 - RNA, 21 nt, synthetic construct
  misc_feature 1..21: note = Synthetic
  source 1..21: mol_type = other RNA
tcccctcacccggaggaggag

SEQ ID NO: 8967 - RNA, 21 nt, synthetic construct
  misc_feature 1..21: note = Synthetic
  source 1..21: mol_type = other RNA
cccctcacccggaggaggagg

SEQ ID NO: 8968 - RNA, 21 nt, synthetic construct
  misc_feature 1..21: note = Synthetic
  source 1..21: mol_type = other RNA
ccctcacccggaggaggagga

SEQ ID NO: 8969 - RNA, 21 nt, synthetic construct
  misc_feature 1..21: note = Synthetic
  source 1..21: mol_type = other RNA
cctcacccggaggaggaggag

SEQ ID NO: 8970 - RNA, 21 nt, synthetic construct
  misc_feature 1..21: note = Synthetic
  source 1..21: mol_type = other RNA
ctcacccggaggaggaggagg

SEQ ID NO: 8971 - RNA, 21 nt, synthetic construct
  misc_feature 1..21: note = Synthetic
  source 1..21: mol_type = other RNA
tcacccggaggaggaggagga

SEQ ID NO: 8972 - DNA, 21 bp, synthetic construct
  misc_feature 1..21: note = Synthetic
  source 1..21: mol_type = other DNA
cacccggaggaggaggaggaa

SEQ ID NO: 8973 - DNA, 21 bp, synthetic construct
  misc_feature 1..21: note = Synthetic
  source 1..21: mol_type = other DNA
acccggaggaggaggaggaag

SEQ ID NO: 8974 - DNA, 21 bp, synthetic construct
  misc_feature 1..21: note = Synthetic
  source 1..21: mol_type = other DNA
cccggaggaggaggaggaaga

SEQ ID NO: 8975 - DNA, 21 bp, synthetic construct
  misc_feature 1..21: note = Synthetic
  source 1..21: mol_type = other DNA
ccggaggaggaggaggaagag

SEQ ID NO: 8976 - DNA, 21 bp, synthetic construct
  misc_feature 1..21: note = Synthetic
  source 1..21: mol_type = other DNA
cggaggaggaggaggaagagg

SEQ ID NO: 8977 - DNA, 21 bp, synthetic construct
  misc_feature 1..21: note = Synthetic
  source 1..21: mol_type = other DNA
ggaggaggaggaggaagagga

SEQ ID NO: 8978 - DNA, 21 bp, synthetic construct
  misc_feature 1..21: note = Synthetic
  source 1..21: mol_type = other DNA
gaggaggaggaggaagaggaa

SEQ ID NO: 8979 - DNA, 21 bp, synthetic construct
  misc_feature 1..21: note = Synthetic
  source 1..21: mol_type = other DNA
aggaggaggaggaagaggaag

SEQ ID NO: 8980 - DNA, 21 bp, synthetic construct
  misc_feature 1..21: note = Synthetic
  source 1..21: mol_type = other DNA
ggaggaggaggaagaggaaga

SEQ ID NO: 8981 - DNA, 21 bp, synthetic construct
  misc_feature 1..21: note = Synthetic
  source 1..21: mol_type = other DNA
gaggaggaggaagaggaagaa

SEQ ID NO: 8982 - DNA, 21 bp, synthetic construct
  misc_feature 1..21: note = Synthetic
  source 1..21: mol_type = other DNA
aggaggaggaagaggaagaag

SEQ ID NO: 8983 - DNA, 21 bp, synthetic construct
  misc_feature 1..21: note = Synthetic
  source 1..21: mol_type = other DNA
ggaggaggaagaggaagaagg

SEQ ID NO: 8984 - RNA, 21 nt, synthetic construct
  misc_feature 1..21: note = Synthetic
  source 1..21: mol_type = other RNA
gaggaggaagaggaagaaggt

SEQ ID NO: 8985 - RNA, 21 nt, synthetic construct
  misc_feature 1..21: note = Synthetic
  source 1..21: mol_type = other RNA
aggaggaagaggaagaaggta

SEQ ID NO: 8986 - RNA, 21 nt, synthetic construct
  misc_feature 1..21: note = Synthetic
  source 1..21: mol_type = other RNA
ggaggaagaggaagaaggtag

SEQ ID NO: 8987 - RNA, 21 nt, synthetic construct
  misc_feature 1..21: note = Synthetic
  source 1..21: mol_type = other RNA
gaggaagaggaagaaggtagt

SEQ ID NO: 8988 - RNA, 21 nt, synthetic construct
  misc_feature 1..21: note = Synthetic
  source 1..21: mol_type = other RNA
aggaagaggaagaaggtagtg

SEQ ID NO: 8989 - RNA, 21 nt, synthetic construct
  misc_feature 1..21: note = Synthetic
  source 1..21: mol_type = other RNA
ggaagaggaagaaggtagtgc

SEQ ID NO: 8990 - RNA, 21 nt, synthetic construct
  misc_feature 1..21: note = Synthetic
  source 1..21: mol_type = other RNA
gaagaggaagaaggtagtgcg

SEQ ID NO: 8991 - RNA, 21 nt, synthetic construct
  misc_feature 1..21: note = Synthetic
  source 1..21: mol_type = other RNA
aagaggaagaaggtagtgcgg

SEQ ID NO: 8992 - RNA, 21 nt, synthetic construct
  misc_feature 1..21: note = Synthetic
  source 1..21: mol_type = other RNA
agaggaagaaggtagtgcggg

SEQ ID NO: 8993 - RNA, 21 nt, synthetic construct
  misc_feature 1..21: note = Synthetic
  source 1..21: mol_type = other RNA
gaggaagaaggtagtgcgggc

SEQ ID NO: 8994 - RNA, 21 nt, synthetic construct
  misc_feature 1..21: note = Synthetic
  source 1..21: mol_type = other RNA
aggaagaaggtagtgcgggct

SEQ ID NO: 8995 - RNA, 21 nt, synthetic construct
  misc_feature 1..21: note = Synthetic
  source 1..21: mol_type = other RNA
ggaagaaggtagtgcgggctc

SEQ ID NO: 8996 - RNA, 21 nt, synthetic construct
  misc_feature 1..21: note = Synthetic
  source 1..21: mol_type = other RNA
gaagaaggtagtgcgggctcc

SEQ ID NO: 8997 - RNA, 21 nt, synthetic construct
  misc_feature 1..21: note = Synthetic
  source 1..21: mol_type = other RNA
aagaaggtagtgcgggctccc

SEQ ID NO: 8998 - RNA, 21 nt, synthetic construct
  misc_feature 1..21: note = Synthetic
  source 1..21: mol_type = other RNA
agaaggtagtgcgggctcccc

SEQ ID NO: 8999 - RNA, 21 nt, synthetic construct
  misc_feature 1..21: note = Synthetic
  source 1..21: mol_type = other RNA
gaaggtagtgcgggctcccca

SEQ ID NO: 9000 - RNA, 21 nt, synthetic construct
  misc_feature 1..21: note = Synthetic
  source 1..21: mol_type = other RNA
aaggtagtgcgggctccccac

SEQ ID NO: 9001 - RNA, 21 nt, synthetic construct
  misc_feature 1..21: note = Synthetic
  source 1..21: mol_type = other RNA
aggtagtgcgggctccccacc

SEQ ID NO: 9002 - RNA, 21 nt, synthetic construct
  misc_feature 1..21: note = Synthetic
  source 1..21: mol_type = other RNA
ggtagtgcgggctccccaccc

SEQ ID NO: 9003 - RNA, 21 nt, synthetic construct
  misc_feature 1..21: note = Synthetic
  source 1..21: mol_type = other RNA
gtagtgcgggctccccacccg

SEQ ID NO: 9004 - RNA, 21 nt, synthetic construct
  misc_feature 1..21: note = Synthetic
  source 1..21: mol_type = other RNA
tagtgcgggctccccacccgg

SEQ ID NO: 9005 - RNA, 21 nt, synthetic construct
  misc_feature 1..21: note = Synthetic
  source 1..21: mol_type = other RNA
agtgcgggctccccacccgga

SEQ ID NO: 9006 - RNA, 21 nt, synthetic construct
  misc_feature 1..21: note = Synthetic
  source 1..21: mol_type = other RNA
gtgcgggctccccacccggac

SEQ ID NO: 9007 - RNA, 21 nt, synthetic construct
  misc_feature 1..21: note = Synthetic
  source 1..21: mol_type = other RNA
tgcgggctccccacccggaca

SEQ ID NO: 9008 - RNA, 21 nt, synthetic construct
  misc_feature 1..21: note = Synthetic
  source 1..21: mol_type = other RNA
gcgggctccccacccggacag

SEQ ID NO: 9009 - RNA, 21 nt, synthetic construct
  misc_feature 1..21: note = Synthetic
  source 1..21: mol_type = other RNA
cgggctccccacccggacagc

SEQ ID NO: 9010 - RNA, 21 nt, synthetic construct
  misc_feature 1..21: note = Synthetic
  source 1..21: mol_type = other RNA
gggctccccacccggacagct

SEQ ID NO: 9011 - RNA, 21 nt, synthetic construct
  misc_feature 1..21: note = Synthetic
  source 1..21: mol_type = other RNA
ggctccccacccggacagcta

SEQ ID NO: 9012 - RNA, 21 nt, synthetic construct
  misc_feature 1..21: note = Synthetic
  source 1..21: mol_type = other RNA
gctccccacccggacagctac

SEQ ID NO: 9013 - RNA, 21 nt, synthetic construct
  misc_feature 1..21: note = Synthetic
  source 1..21: mol_type = other RNA
ctccccacccggacagctacc

SEQ ID NO: 9014 - RNA, 21 nt, synthetic construct
  misc_feature 1..21: note = Synthetic
  source 1..21: mol_type = other RNA
tccccacccggacagctacct

SEQ ID NO: 9015 - RNA, 21 nt, synthetic construct
  misc_feature 1..21: note = Synthetic
  source 1..21: mol_type = other RNA
ccccacccggacagctacctc

SEQ ID NO: 9016 - RNA, 21 nt, synthetic construct
  misc_feature 1..21: note = Synthetic
  source 1..21: mol_type = other RNA
cccacccggacagctacctct

SEQ ID NO: 9017 - RNA, 21 nt, synthetic construct
  misc_feature 1..21: note = Synthetic
  source 1..21: mol_type = other RNA
ccacccggacagctacctctc

SEQ ID NO: 9018 - RNA, 21 nt, synthetic construct
  misc_feature 1..21: note = Synthetic
  source 1..21: mol_type = other RNA
cacccggacagctacctctcg

SEQ ID NO: 9019 - RNA, 21 nt, synthetic construct
  misc_feature 1..21: note = Synthetic
  source 1..21: mol_type = other RNA
acccggacagctacctctcgc

SEQ ID NO: 9020 - RNA, 21 nt, synthetic construct
  misc_feature 1..21: note = Synthetic
  source 1..21: mol_type = other RNA
cccggacagctacctctcgcc

SEQ ID NO: 9021 - RNA, 21 nt, synthetic construct
  misc_feature 1..21: note = Synthetic
  source 1..21: mol_type = other RNA
ccggacagctacctctcgcct

SEQ ID NO: 9022 - RNA, 21 nt, synthetic construct
  misc_feature 1..21: note = Synthetic
  source 1..21: mol_type = other RNA
cggacagctacctctcgcctc

SEQ ID NO: 9023 - RNA, 21 nt, synthetic construct
  misc_feature 1..21: note = Synthetic
  source 1..21: mol_type = other RNA
ggacagctacctctcgcctca

SEQ ID NO: 9024 - RNA, 21 nt, synthetic construct
  misc_feature 1..21: note = Synthetic
  source 1..21: mol_type = other RNA
gacagctacctctcgcctcag

SEQ ID NO: 9025 - RNA, 21 nt, synthetic construct
  misc_feature 1..21: note = Synthetic
  source 1..21: mol_type = other RNA
acagctacctctcgcctcagc

SEQ ID NO: 9026 - RNA, 21 nt, synthetic construct
  misc_feature 1..21: note = Synthetic
  source 1..21: mol_type = other RNA
cagctacctctcgcctcagcc

SEQ ID NO: 9027 - RNA, 21 nt, synthetic construct
  misc_feature 1..21: note = Synthetic
  source 1..21: mol_type = other RNA
agctacctctcgcctcagcct

SEQ ID NO: 9028 - RNA, 21 nt, synthetic construct
  misc_feature 1..21: note = Synthetic
  source 1..21: mol_type = other RNA
gctacctctcgcctcagcctc

SEQ ID NO: 9029 - RNA, 21 nt, synthetic construct
  misc_feature 1..21: note = Synthetic
  source 1..21: mol_type = other RNA
ctacctctcgcctcagcctcc

SEQ ID NO: 9030 - RNA, 21 nt, synthetic construct
  misc_feature 1..21: note = Synthetic
  source 1..21: mol_type = other RNA
tacctctcgcctcagcctccc

SEQ ID NO: 9031 - RNA, 21 nt, synthetic construct
  misc_feature 1..21: note = Synthetic
  source 1..21: mol_type = other RNA
acctctcgcctcagcctccct

SEQ ID NO: 9032 - RNA, 21 nt, synthetic construct
  misc_feature 1..21: note = Synthetic
  source 1..21: mol_type = other RNA
cctctcgcctcagcctccctg

SEQ ID NO: 9033 - RNA, 21 nt, synthetic construct
  misc_feature 1..21: note = Synthetic
  source 1..21: mol_type = other RNA
ctctcgcctcagcctccctgg

SEQ ID NO: 9034 - RNA, 21 nt, synthetic construct
  misc_feature 1..21: note = Synthetic
  source 1..21: mol_type = other RNA
tctcgcctcagcctccctgga

SEQ ID NO: 9035 - RNA, 21 nt, synthetic construct
  misc_feature 1..21: note = Synthetic
  source 1..21: mol_type = other RNA
ctcgcctcagcctccctggac

SEQ ID NO: 9036 - RNA, 21 nt, synthetic construct
  misc_feature 1..21: note = Synthetic
  source 1..21: mol_type = other RNA
tcgcctcagcctccctggaca

SEQ ID NO: 9037 - RNA, 21 nt, synthetic construct
  misc_feature 1..21: note = Synthetic
  source 1..21: mol_type = other RNA
cgcctcagcctccctggacag

SEQ ID NO: 9038 - RNA, 21 nt, synthetic construct
  misc_feature 1..21: note = Synthetic
  source 1..21: mol_type = other RNA
gcctcagcctccctggacagc

SEQ ID NO: 9039 - RNA, 21 nt, synthetic construct
  misc_feature 1..21: note = Synthetic
  source 1..21: mol_type = other RNA
cctcagcctccctggacagcg

SEQ ID NO: 9040 - RNA, 21 nt, synthetic construct
  misc_feature 1..21: note = Synthetic
  source 1..21: mol_type = other RNA
ctcagcctccctggacagcga

SEQ ID NO: 9041 - RNA, 21 nt, synthetic construct
  misc_feature 1..21: note = Synthetic
  source 1..21: mol_type = other RNA
tcagcctccctggacagcgac

SEQ ID NO: 9042 - RNA, 21 nt, synthetic construct
  misc_feature 1..21: note = Synthetic
  source 1..21: mol_type = other RNA
cagcctccctggacagcgacg

SEQ ID NO: 9043 - RNA, 21 nt, synthetic construct
  misc_feature 1..21: note = Synthetic
  source 1..21: mol_type = other RNA
agcctccctggacagcgacgg

SEQ ID NO: 9044 - RNA, 21 nt, synthetic construct
  misc_feature 1..21: note = Synthetic
  source 1..21: mol_type = other RNA
gcctccctggacagcgacggc

SEQ ID NO: 9045 - RNA, 21 nt, synthetic construct
  misc_feature 1..21: note = Synthetic
  source 1..21: mol_type = other RNA
cctccctggacagcgacggcg

SEQ ID NO: 9046 - RNA, 21 nt, synthetic construct
  misc_feature 1..21: note = Synthetic
  source 1..21: mol_type = other RNA
ctccctggacagcgacggcgg

SEQ ID NO: 9047 - RNA, 21 nt, synthetic construct
  misc_feature 1..21: note = Synthetic
  source 1..21: mol_type = other RNA
tccctggacagcgacggcggc

SEQ ID NO: 9048 - RNA, 21 nt, synthetic construct
  misc_feature 1..21: note = Synthetic
  source 1..21: mol_type = other RNA
ccctggacagcgacggcggcc

SEQ ID NO: 9049 - RNA, 21 nt, synthetic construct
  misc_feature 1..21: note = Synthetic
  source 1..21: mol_type = other RNA
cctggacagcgacggcggccg

SEQ ID NO: 9050 - RNA, 21 nt, synthetic construct
  misc_feature 1..21: note = Synthetic
  source 1..21: mol_type = other RNA
ctggacagcgacggcggccgg

SEQ ID NO: 9051 - RNA, 21 nt, synthetic construct
  misc_feature 1..21: note = Synthetic
  source 1..21: mol_type = other RNA
tggacagcgacggcggccgga

SEQ ID NO: 9052 - DNA, 21 bp, synthetic construct
  misc_feature 1..21: note = Synthetic
  source 1..21: mol_type = other DNA
ggacagcgacggcggccggaa

SEQ ID NO: 9053 - DNA, 21 bp, synthetic construct
  misc_feature 1..21: note = Synthetic
  source 1..21: mol_type = other DNA
gacagcgacggcggccggaaa

SEQ ID NO: 9054 - DNA, 21 bp, synthetic construct
  misc_feature 1..21: note = Synthetic
  source 1..21: mol_type = other DNA
acagcgacggcggccggaaac

SEQ ID NO: 9055 - RNA, 21 nt, synthetic construct
  misc_feature 1..21: note = Synthetic
  source 1..21: mol_type = other RNA
aggttggtgttctaacaccca

SEQ ID NO: 9056 - RNA, 21 nt, synthetic construct
  misc_feature 1..21: note = Synthetic
  source 1..21: mol_type = other RNA
ggttggtgttctaacacccag

SEQ ID NO: 9057 - RNA, 21 nt, synthetic construct
  misc_feature 1..21: note = Synthetic
  source 1..21: mol_type = other RNA
gttggtgttctaacacccagt

SEQ ID NO: 9058 - RNA, 21 nt, synthetic construct
  misc_feature 1..21: note = Synthetic
  source 1..21: mol_type = other RNA
ttggtgttctaacacccagtt

SEQ ID NO: 9059 - RNA, 21 nt, synthetic construct
  misc_feature 1..21: note = Synthetic
  source 1..21: mol_type = other RNA
tggtgttctaacacccagttc

SEQ ID NO: 9060 - RNA, 21 nt, synthetic construct
  misc_feature 1..21: note = Synthetic
  source 1..21: mol_type = other RNA
ggtgttctaacacccagttca

SEQ ID NO: 9061 - RNA, 21 nt, synthetic construct
  misc_feature 1..21: note = Synthetic
  source 1..21: mol_type = other RNA
gtgttctaacacccagttcag

SEQ ID NO: 9062 - RNA, 21 nt, synthetic construct
  misc_feature 1..21: note = Synthetic
  source 1..21: mol_type = other RNA
tgttctaacacccagttcagc

SEQ ID NO: 9063 - RNA, 21 nt, synthetic construct
  misc_feature 1..21: note = Synthetic
  source 1..21: mol_type = other RNA
gttctaacacccagttcagca

SEQ ID NO: 9064 - RNA, 21 nt, synthetic construct
  misc_feature 1..21: note = Synthetic
  source 1..21: mol_type = other RNA
ttctaacacccagttcagcat

SEQ ID NO: 9065 - RNA, 21 nt, synthetic construct
  misc_feature 1..21: note = Synthetic
  source 1..21: mol_type = other RNA
tctaacacccagttcagcatg

SEQ ID NO: 9066 - RNA, 21 nt, synthetic construct
  misc_feature 1..21: note = Synthetic
  source 1..21: mol_type = other RNA
ctaacacccagttcagcatgt

SEQ ID NO: 9067 - RNA, 21 nt, synthetic construct
  misc_feature 1..21: note = Synthetic
  source 1..21: mol_type = other RNA
taacacccagttcagcatgtg

SEQ ID NO: 9068 - RNA, 21 nt, synthetic construct
  misc_feature 1..21: note = Synthetic
  source 1..21: mol_type = other RNA
aacacccagttcagcatgtga

SEQ ID NO: 9069 - RNA, 21 nt, synthetic construct
  misc_feature 1..21: note = Synthetic
  source 1..21: mol_type = other RNA
acacccagttcagcatgtgag

SEQ ID NO: 9070 - RNA, 21 nt, synthetic construct
  misc_feature 1..21: note = Synthetic
  source 1..21: mol_type = other RNA
cacccagttcagcatgtgagt

SEQ ID NO: 9071 - RNA, 21 nt, synthetic construct
  misc_feature 1..21: note = Synthetic
  source 1..21: mol_type = other RNA
acccagttcagcatgtgagtg

SEQ ID NO: 9072 - RNA, 21 nt, synthetic construct
  misc_feature 1..21: note = Synthetic
  source 1..21: mol_type = other RNA
cccagttcagcatgtgagtga

SEQ ID NO: 9073 - RNA, 21 nt, synthetic construct
  misc_feature 1..21: note = Synthetic
  source 1..21: mol_type = other RNA
ccagttcagcatgtgagtgaa

SEQ ID NO: 9074 - RNA, 21 nt, synthetic construct
  misc_feature 1..21: note = Synthetic
  source 1..21: mol_type = other RNA
cagttcagcatgtgagtgaat

SEQ ID NO: 9075 - RNA, 21 nt, synthetic construct
  misc_feature 1..21: note = Synthetic
  source 1..21: mol_type = other RNA
agttcagcatgtgagtgaata

SEQ ID NO: 9076 - RNA, 21 nt, synthetic construct
  misc_feature 1..21: note = Synthetic
  source 1..21: mol_type = other RNA
gttcagcatgtgagtgaatat

SEQ ID NO: 9077 - RNA, 21 nt, synthetic construct
  misc_feature 1..21: note = Synthetic
  source 1..21: mol_type = other RNA
ttcagcatgtgagtgaatatg

SEQ ID NO: 9078 - RNA, 21 nt, synthetic construct
  misc_feature 1..21: note = Synthetic
  source 1..21: mol_type = other RNA
tcagcatgtgagtgaatatgg

SEQ ID NO: 9079 - RNA, 21 nt, synthetic construct
  misc_feature 1..21: note = Synthetic
  source 1..21: mol_type = other RNA
cagcatgtgagtgaatatgga

SEQ ID NO: 9080 - RNA, 21 nt, synthetic construct
  misc_feature 1..21: note = Synthetic
  source 1..21: mol_type = other RNA
agcatgtgagtgaatatggag

SEQ ID NO: 9081 - RNA, 21 nt, synthetic construct
  misc_feature 1..21: note = Synthetic
  source 1..21: mol_type = other RNA
gcatgtgagtgaatatggagt

SEQ ID NO: 9082 - RNA, 21 nt, synthetic construct
  misc_feature 1..21: note = Synthetic
  source 1..21: mol_type = other RNA
catgtgagtgaatatggagtc

SEQ ID NO: 9083 - RNA, 21 nt, synthetic construct
  misc_feature 1..21: note = Synthetic
  source 1..21: mol_type = other RNA
atgtgagtgaatatggagtca

SEQ ID NO: 9084 - RNA, 21 nt, synthetic construct
  misc_feature 1..21: note = Synthetic
  source 1..21: mol_type = other RNA
tgtgagtgaatatggagtcag

SEQ ID NO: 9085 - RNA, 21 nt, synthetic construct
  misc_feature 1..21: note = Synthetic
  source 1..21: mol_type = other RNA
gtgagtgaatatggagtcaga

SEQ ID NO: 9086 - RNA, 21 nt, synthetic construct
  misc_feature 1..21: note = Synthetic
  source 1..21: mol_type = other RNA
tgagtgaatatggagtcagat

SEQ ID NO: 9087 - RNA, 21 nt, synthetic construct
  misc_feature 1..21: note = Synthetic
  source 1..21: mol_type = other RNA
gagtgaatatggagtcagata

SEQ ID NO: 9088 - RNA, 21 nt, synthetic construct
  misc_feature 1..21: note = Synthetic
  source 1..21: mol_type = other RNA
agtgaatatggagtcagatat

SEQ ID NO: 9089 - RNA, 21 nt, synthetic construct
  misc_feature 1..21: note = Synthetic
  source 1..21: mol_type = other RNA
gtgaatatggagtcagatatc

SEQ ID NO: 9090 - RNA, 21 nt, synthetic construct
  misc_feature 1..21: note = Synthetic
  source 1..21: mol_type = other RNA
tgaatatggagtcagatatca

SEQ ID NO: 9091 - RNA, 21 nt, synthetic construct
  misc_feature 1..21: note = Synthetic
  source 1..21: mol_type = other RNA
gaatatggagtcagatatcat

SEQ ID NO: 9092 - RNA, 21 nt, synthetic construct
  misc_feature 1..21: note = Synthetic
  source 1..21: mol_type = other RNA
aatatggagtcagatatcatg

SEQ ID NO: 9093 - RNA, 21 nt, synthetic construct
  misc_feature 1..21: note = Synthetic
  source 1..21: mol_type = other RNA
atatggagtcagatatcatga

SEQ ID NO: 9094 - RNA, 21 nt, synthetic construct
  misc_feature 1..21: note = Synthetic
  source 1..21: mol_type = other RNA
tatggagtcagatatcatgag

SEQ ID NO: 9095 - RNA, 21 nt, synthetic construct
  misc_feature 1..21: note = Synthetic
  source 1..21: mol_type = other RNA
atggagtcagatatcatgagg

SEQ ID NO: 9096 - RNA, 21 nt, synthetic construct
  misc_feature 1..21: note = Synthetic
  source 1..21: mol_type = other RNA
tggagtcagatatcatgaggc

SEQ ID NO: 9097 - RNA, 21 nt, synthetic construct
  misc_feature 1..21: note = Synthetic
  source 1..21: mol_type = other RNA
ggagtcagatatcatgaggca

SEQ ID NO: 9098 - RNA, 21 nt, synthetic construct
  misc_feature 1..21: note = Synthetic
  source 1..21: mol_type = other RNA
gagtcagatatcatgaggcac

SEQ ID NO: 9099 - RNA, 21 nt, synthetic construct
  misc_feature 1..21: note = Synthetic
  source 1..21: mol_type = other RNA
agtcagatatcatgaggcacc

SEQ ID NO: 9100 - RNA, 21 nt, synthetic construct
  misc_feature 1..21: note = Synthetic
  source 1..21: mol_type = other RNA
gtcagatatcatgaggcacct

SEQ ID NO: 9101 - RNA, 21 nt, synthetic construct
  misc_feature 1..21: note = Synthetic
  source 1..21: mol_type = other RNA
tcagatatcatgaggcacctt

SEQ ID NO: 9102 - RNA, 21 nt, synthetic construct
  misc_feature 1..21: note = Synthetic
  source 1..21: mol_type = other RNA
cagatatcatgaggcaccttg

SEQ ID NO: 9103 - RNA, 21 nt, synthetic construct
  misc_feature 1..21: note = Synthetic
  source 1..21: mol_type = other RNA
agatatcatgaggcaccttgc

SEQ ID NO: 9104 - RNA, 21 nt, synthetic construct
  misc_feature 1..21: note = Synthetic
  source 1..21: mol_type = other RNA
gatatcatgaggcaccttgct

SEQ ID NO: 9105 - RNA, 21 nt, synthetic construct
  misc_feature 1..21: note = Synthetic
  source 1..21: mol_type = other RNA
atatcatgaggcaccttgcta

SEQ ID NO: 9106 - RNA, 21 nt, synthetic construct
  misc_feature 1..21: note = Synthetic
  source 1..21: mol_type = other RNA
tatcatgaggcaccttgctaa

SEQ ID NO: 9107 - RNA, 21 nt, synthetic construct
  misc_feature 1..21: note = Synthetic
  source 1..21: mol_type = other RNA
atcatgaggcaccttgctaag

SEQ ID NO: 9108 - RNA, 21 nt, synthetic construct
  misc_feature 1..21: note = Synthetic
  source 1..21: mol_type = other RNA
tcatgaggcaccttgctaagg

SEQ ID NO: 9109 - RNA, 21 nt, synthetic construct
  misc_feature 1..21: note = Synthetic
  source 1..21: mol_type = other RNA
catgaggcaccttgctaaggg

SEQ ID NO: 9110 - RNA, 21 nt, synthetic construct
  misc_feature 1..21: note = Synthetic
  source 1..21: mol_type = other RNA
atgaggcaccttgctaagggt

SEQ ID NO: 9111 - RNA, 21 nt, synthetic construct
  misc_feature 1..21: note = Synthetic
  source 1..21: mol_type = other RNA
tgaggcaccttgctaagggtt

SEQ ID NO: 9112 - RNA, 21 nt, synthetic construct
  misc_feature 1..21: note = Synthetic
  source 1..21: mol_type = other RNA
gaggcaccttgctaagggttt

SEQ ID NO: 9113 - RNA, 21 nt, synthetic construct
  misc_feature 1..21: note = Synthetic
  source 1..21: mol_type = other RNA
aggcaccttgctaagggtttc

SEQ ID NO: 9114 - RNA, 21 nt, synthetic construct
  misc_feature 1..21: note = Synthetic
  source 1..21: mol_type = other RNA
ggcaccttgctaagggtttcc

SEQ ID NO: 9115 - RNA, 21 nt, synthetic construct
  misc_feature 1..21: note = Synthetic
  source 1..21: mol_type = other RNA
gcaccttgctaagggtttccc

SEQ ID NO: 9116 - RNA, 21 nt, synthetic construct
  misc_feature 1..21: note = Synthetic
  source 1..21: mol_type = other RNA
caccttgctaagggtttcccc

SEQ ID NO: 9117 - RNA, 21 nt, synthetic construct
  misc_feature 1..21: note = Synthetic
  source 1..21: mol_type = other RNA
accttgctaagggtttccccc

SEQ ID NO: 9118 - RNA, 21 nt, synthetic construct
  misc_feature 1..21: note = Synthetic
  source 1..21: mol_type = other RNA
ccttgctaagggtttccccct

SEQ ID NO: 9119 - RNA, 21 nt, synthetic construct
  misc_feature 1..21: note = Synthetic
  source 1..21: mol_type = other RNA
cttgctaagggtttccccctt

SEQ ID NO: 9120 - RNA, 21 nt, synthetic construct
  misc_feature 1..21: note = Synthetic
  source 1..21: mol_type = other RNA
ttgctaagggtttcccccttc

SEQ ID NO: 9121 - RNA, 21 nt, synthetic construct
  misc_feature 1..21: note = Synthetic
  source 1..21: mol_type = other RNA
tgctaagggtttcccccttca

SEQ ID NO: 9122 - RNA, 21 nt, synthetic construct
  misc_feature 1..21: note = Synthetic
  source 1..21: mol_type = other RNA
gctaagggtttcccccttcaa

SEQ ID NO: 9123 - RNA, 21 nt, synthetic construct
  misc_feature 1..21: note = Synthetic
  source 1..21: mol_type = other RNA
ctaagggtttcccccttcaag

SEQ ID NO: 9124 - RNA, 21 nt, synthetic construct
  misc_feature 1..21: note = Synthetic
  source 1..21: mol_type = other RNA
taagggtttcccccttcaagg

SEQ ID NO: 9125 - RNA, 21 nt, synthetic construct
  misc_feature 1..21: note = Synthetic
  source 1..21: mol_type = other RNA
aagggtttcccccttcaagga

SEQ ID NO: 9126 - RNA, 21 nt, synthetic construct
  misc_feature 1..21: note = Synthetic
  source 1..21: mol_type = other RNA
agggtttcccccttcaaggaa

SEQ ID NO: 9127 - RNA, 21 nt, synthetic construct
  misc_feature 1..21: note = Synthetic
  source 1..21: mol_type = other RNA
gggtttcccccttcaaggaaa

SEQ ID NO: 9128 - RNA, 21 nt, synthetic construct
  misc_feature 1..21: note = Synthetic
  source 1..21: mol_type = other RNA
ggtttcccccttcaaggaaac

SEQ ID NO: 9129 - RNA, 21 nt, synthetic construct
  misc_feature 1..21: note = Synthetic
  source 1..21: mol_type = other RNA
gtttcccccttcaaggaaaca

SEQ ID NO: 9130 - RNA, 21 nt, synthetic construct
  misc_feature 1..21: note = Synthetic
  source 1..21: mol_type = other RNA
tttcccccttcaaggaaacaa

SEQ ID NO: 9131 - RNA, 21 nt, synthetic construct
  misc_feature 1..21: note = Synthetic
  source 1..21: mol_type = other RNA
ttcccccttcaaggaaacaac

SEQ ID NO: 9132 - RNA, 21 nt, synthetic construct
  misc_feature 1..21: note = Synthetic
  source 1..21: mol_type = other RNA
tcccccttcaaggaaacaacc

SEQ ID NO: 9133 - RNA, 21 nt, synthetic construct
  misc_feature 1..21: note = Synthetic
  source 1..21: mol_type = other RNA
cccccttcaaggaaacaaccc

SEQ ID NO: 9134 - RNA, 21 nt, synthetic construct
  misc_feature 1..21: note = Synthetic
  source 1..21: mol_type = other RNA
ccccttcaaggaaacaaccct

SEQ ID NO: 9135 - RNA, 21 nt, synthetic construct
  misc_feature 1..21: note = Synthetic
  source 1..21: mol_type = other RNA
cccttcaaggaaacaaccctc

SEQ ID NO: 9136 - RNA, 21 nt, synthetic construct
  misc_feature 1..21: note = Synthetic
  source 1..21: mol_type = other RNA
ccttcaaggaaacaaccctct

SEQ ID NO: 9137 - RNA, 21 nt, synthetic construct
  misc_feature 1..21: note = Synthetic
  source 1..21: mol_type = other RNA
cttcaaggaaacaaccctctc

SEQ ID NO: 9138 - RNA, 21 nt, synthetic construct
  misc_feature 1..21: note = Synthetic
  source 1..21: mol_type = other RNA
ttcaaggaaacaaccctctct

SEQ ID NO: 9139 - RNA, 21 nt, synthetic construct
  misc_feature 1..21: note = Synthetic
  source 1..21: mol_type = other RNA
tcaaggaaacaaccctctctg

SEQ ID NO: 9140 - RNA, 21 nt, synthetic construct
  misc_feature 1..21: note = Synthetic
  source 1..21: mol_type = other RNA
caaggaaacaaccctctctga

SEQ ID NO: 9141 - RNA, 21 nt, synthetic construct
  misc_feature 1..21: note = Synthetic
  source 1..21: mol_type = other RNA
aaggaaacaaccctctctgac

SEQ ID NO: 9142 - RNA, 21 nt, synthetic construct
  misc_feature 1..21: note = Synthetic
  source 1..21: mol_type = other RNA
aggaaacaaccctctctgaca

SEQ ID NO: 9143 - RNA, 21 nt, synthetic construct
  misc_feature 1..21: note = Synthetic
  source 1..21: mol_type = other RNA
ggaaacaaccctctctgacac

SEQ ID NO: 9144 - RNA, 21 nt, synthetic construct
  misc_feature 1..21: note = Synthetic
  source 1..21: mol_type = other RNA
gaaacaaccctctctgacaca

SEQ ID NO: 9145 - RNA, 21 nt, synthetic construct
  misc_feature 1..21: note = Synthetic
  source 1..21: mol_type = other RNA
aaacaaccctctctgacacag

SEQ ID NO: 9146 - RNA, 21 nt, synthetic construct
  misc_feature 1..21: note = Synthetic
  source 1..21: mol_type = other RNA
aacaaccctctctgacacagc

SEQ ID NO: 9147 - RNA, 21 nt, synthetic construct
  misc_feature 1..21: note = Synthetic
  source 1..21: mol_type = other RNA
acaaccctctctgacacagca

SEQ ID NO: 9148 - RNA, 21 nt, synthetic construct
  misc_feature 1..21: note = Synthetic
  source 1..21: mol_type = other RNA
agacaggcagaaccagtacaa

SEQ ID NO: 9149 - RNA, 21 nt, synthetic construct
  misc_feature 1..21: note = Synthetic
  source 1..21: mol_type = other RNA
gacaggcagaaccagtacaaa

SEQ ID NO: 9150 - RNA, 21 nt, synthetic construct
  misc_feature 1..21: note = Synthetic
  source 1..21: mol_type = other RNA
acaggcagaaccagtacaaag

SEQ ID NO: 9151 - RNA, 21 nt, synthetic construct
  misc_feature 1..21: note = Synthetic
  source 1..21: mol_type = other RNA
caggcagaaccagtacaaagc

SEQ ID NO: 9152 - RNA, 21 nt, synthetic construct
  misc_feature 1..21: note = Synthetic
  source 1..21: mol_type = other RNA
aggcagaaccagtacaaagcg

SEQ ID NO: 9153 - RNA, 21 nt, synthetic construct
  misc_feature 1..21: note = Synthetic
  source 1..21: mol_type = other RNA
ggcagaaccagtacaaagcga

SEQ ID NO: 9154 - RNA, 21 nt, synthetic construct
  misc_feature 1..21: note = Synthetic
  source 1..21: mol_type = other RNA
gcagaaccagtacaaagcgaa

SEQ ID NO: 9155 - RNA, 21 nt, synthetic construct
  misc_feature 1..21: note = Synthetic
  source 1..21: mol_type = other RNA
cagaaccagtacaaagcgaag

SEQ ID NO: 9156 - RNA, 21 nt, synthetic construct
  misc_feature 1..21: note = Synthetic
  source 1..21: mol_type = other RNA
agaaccagtacaaagcgaagg

SEQ ID NO: 9157 - RNA, 21 nt, synthetic construct
  misc_feature 1..21: note = Synthetic
  source 1..21: mol_type = other RNA
gaaccagtacaaagcgaagga

SEQ ID NO: 9158 - RNA, 21 nt, synthetic construct
  misc_feature 1..21: note = Synthetic
  source 1..21: mol_type = other RNA
aaccagtacaaagcgaaggaa

SEQ ID NO: 9159 - RNA, 21 nt, synthetic construct
  misc_feature 1..21: note = Synthetic
  source 1..21: mol_type = other RNA
accagtacaaagcgaaggaat

SEQ ID NO: 9160 - RNA, 21 nt, synthetic construct
  misc_feature 1..21: note = Synthetic
  source 1..21: mol_type = other RNA
ccagtacaaagcgaaggaatc

SEQ ID NO: 9161 - RNA, 21 nt, synthetic construct
  misc_feature 1..21: note = Synthetic
  source 1..21: mol_type = other RNA
cagtacaaagcgaaggaatct

SEQ ID NO: 9162 - RNA, 21 nt, synthetic construct
  misc_feature 1..21: note = Synthetic
  source 1..21: mol_type = other RNA
agtacaaagcgaaggaatctg

SEQ ID NO: 9163 - RNA, 21 nt, synthetic construct
  misc_feature 1..21: note = Synthetic
  source 1..21: mol_type = other RNA
gtacaaagcgaaggaatctgg

SEQ ID NO: 9164 - RNA, 21 nt, synthetic construct
  misc_feature 1..21: note = Synthetic
  source 1..21: mol_type = other RNA
tacaaagcgaaggaatctggg

SEQ ID NO: 9165 - RNA, 21 nt, synthetic construct
  misc_feature 1..21: note = Synthetic
  source 1..21: mol_type = other RNA
acaaagcgaaggaatctgggc

SEQ ID NO: 9166 - RNA, 21 nt, synthetic construct
  misc_feature 1..21: note = Synthetic
  source 1..21: mol_type = other RNA
caaagcgaaggaatctgggcc

SEQ ID NO: 9167 - RNA, 21 nt, synthetic construct
  misc_feature 1..21: note = Synthetic
  source 1..21: mol_type = other RNA
aaagcgaaggaatctgggccc

SEQ ID NO: 9168 - RNA, 21 nt, synthetic construct
  misc_feature 1..21: note = Synthetic
  source 1..21: mol_type = other RNA
aagcgaaggaatctgggcccc

SEQ ID NO: 9169 - RNA, 21 nt, synthetic construct
  misc_feature 1..21: note = Synthetic
  source 1..21: mol_type = other RNA
agcgaaggaatctgggccccc

SEQ ID NO: 9170 - RNA, 21 nt, synthetic construct
  misc_feature 1..21: note = Synthetic
  source 1..21: mol_type = other RNA
gcgaaggaatctgggccccca

SEQ ID NO: 9171 - RNA, 21 nt, synthetic construct
  misc_feature 1..21: note = Synthetic
  source 1..21: mol_type = other RNA
cgaaggaatctgggcccccag

SEQ ID NO: 9172 - RNA, 21 nt, synthetic construct
  misc_feature 1..21: note = Synthetic
  source 1..21: mol_type = other RNA
gaaggaatctgggcccccagc

SEQ ID NO: 9173 - RNA, 21 nt, synthetic construct
  misc_feature 1..21: note = Synthetic
  source 1..21: mol_type = other RNA
aaggaatctgggcccccagcc

SEQ ID NO: 9174 - RNA, 21 nt, synthetic construct
  misc_feature 1..21: note = Synthetic
  source 1..21: mol_type = other RNA
aggaatctgggcccccagcct

SEQ ID NO: 9175 - RNA, 21 nt, synthetic construct
  misc_feature 1..21: note = Synthetic
  source 1..21: mol_type = other RNA
ggaatctgggcccccagcctc

SEQ ID NO: 9176 - RNA, 21 nt, synthetic construct
  misc_feature 1..21: note = Synthetic
  source 1..21: mol_type = other RNA
gaatctgggcccccagcctct

SEQ ID NO: 9177 - RNA, 21 nt, synthetic construct
  misc_feature 1..21: note = Synthetic
  source 1..21: mol_type = other RNA
aatctgggcccccagcctctc

SEQ ID NO: 9178 - RNA, 21 nt, synthetic construct
  misc_feature 1..21: note = Synthetic
  source 1..21: mol_type = other RNA
atctgggcccccagcctctcg

SEQ ID NO: 9179 - RNA, 21 nt, synthetic construct
  misc_feature 1..21: note = Synthetic
  source 1..21: mol_type = other RNA
tctgggcccccagcctctcgc

SEQ ID NO: 9180 - RNA, 21 nt, synthetic construct
  misc_feature 1..21: note = Synthetic
  source 1..21: mol_type = other RNA
ctgggcccccagcctctcgcc

SEQ ID NO: 9181 - RNA, 21 nt, synthetic construct
  misc_feature 1..21: note = Synthetic
  source 1..21: mol_type = other RNA
tgggcccccagcctctcgccg

SEQ ID NO: 9182 - RNA, 21 nt, synthetic construct
  misc_feature 1..21: note = Synthetic
  source 1..21: mol_type = other RNA
gggcccccagcctctcgccgc

SEQ ID NO: 9183 - RNA, 21 nt, synthetic construct
  misc_feature 1..21: note = Synthetic
  source 1..21: mol_type = other RNA
ggcccccagcctctcgccgcc

SEQ ID NO: 9184 - RNA, 21 nt, synthetic construct
  misc_feature 1..21: note = Synthetic
  source 1..21: mol_type = other RNA
gcccccagcctctcgccgccc

SEQ ID NO: 9185 - RNA, 21 nt, synthetic construct
  misc_feature 1..21: note = Synthetic
  source 1..21: mol_type = other RNA
cccccagcctctcgccgcccg

SEQ ID NO: 9186 - RNA, 21 nt, synthetic construct
  misc_feature 1..21: note = Synthetic
  source 1..21: mol_type = other RNA
ccccagcctctcgccgcccgc

SEQ ID NO: 9187 - RNA, 21 nt, synthetic construct
  misc_feature 1..21: note = Synthetic
  source 1..21: mol_type = other RNA
cccagcctctcgccgcccgct

SEQ ID NO: 9188 - RNA, 21 nt, synthetic construct
  misc_feature 1..21: note = Synthetic
  source 1..21: mol_type = other RNA
ccagcctctcgccgcccgctc

SEQ ID NO: 9189 - RNA, 21 nt, synthetic construct
  misc_feature 1..21: note = Synthetic
  source 1..21: mol_type = other RNA
cagcctctcgccgcccgctct

SEQ ID NO: 9190 - RNA, 21 nt, synthetic construct
  misc_feature 1..21: note = Synthetic
  source 1..21: mol_type = other RNA
agcctctcgccgcccgctctc

SEQ ID NO: 9191 - RNA, 21 nt, synthetic construct
  misc_feature 1..21: note = Synthetic
  source 1..21: mol_type = other RNA
gcctctcgccgcccgctctcc

SEQ ID NO: 9192 - RNA, 21 nt, synthetic construct
  misc_feature 1..21: note = Synthetic
  source 1..21: mol_type = other RNA
cctctcgccgcccgctctcca

SEQ ID NO: 9193 - RNA, 21 nt, synthetic construct
  misc_feature 1..21: note = Synthetic
  source 1..21: mol_type = other RNA
ctctcgccgcccgctctccag

SEQ ID NO: 9194 - RNA, 21 nt, synthetic construct
  misc_feature 1..21: note = Synthetic
  source 1..21: mol_type = other RNA
tctcgccgcccgctctccaga

SEQ ID NO: 9195 - RNA, 21 nt, synthetic construct
  misc_feature 1..21: note = Synthetic
  source 1..21: mol_type = other RNA
ctcgccgcccgctctccagag

SEQ ID NO: 9196 - RNA, 21 nt, synthetic construct
  misc_feature 1..21: note = Synthetic
  source 1..21: mol_type = other RNA
tcgccgcccgctctccagagg

SEQ ID NO: 9197 - RNA, 21 nt, synthetic construct
  misc_feature 1..21: note = Synthetic
  source 1..21: mol_type = other RNA
cgccgcccgctctccagaggc

SEQ ID NO: 9198 - RNA, 21 nt, synthetic construct
  misc_feature 1..21: note = Synthetic
  source 1..21: mol_type = other RNA
gccgcccgctctccagaggca

SEQ ID NO: 9199 - RNA, 21 nt, synthetic construct
  misc_feature 1..21: note = Synthetic
  source 1..21: mol_type = other RNA
ccgcccgctctccagaggcag

SEQ ID NO: 9200 - RNA, 21 nt, synthetic construct
  misc_feature 1..21: note = Synthetic
  source 1..21: mol_type = other RNA
cgcccgctctccagaggcagt

SEQ ID NO: 9201 - RNA, 21 nt, synthetic construct
  misc_feature 1..21: note = Synthetic
  source 1..21: mol_type = other RNA
gcccgctctccagaggcagtc

SEQ ID NO: 9202 - RNA, 21 nt, synthetic construct
  misc_feature 1..21: note = Synthetic
  source 1..21: mol_type = other RNA
cccgctctccagaggcagtct

SEQ ID NO: 9203 - RNA, 21 nt, synthetic construct
  misc_feature 1..21: note = Synthetic
  source 1..21: mol_type = other RNA
ccgctctccagaggcagtctg

SEQ ID NO: 9204 - RNA, 21 nt, synthetic construct
  misc_feature 1..21: note = Synthetic
  source 1..21: mol_type = other RNA
cgctctccagaggcagtctgc

SEQ ID NO: 9205 - RNA, 21 nt, synthetic construct
  misc_feature 1..21: note = Synthetic
  source 1..21: mol_type = other RNA
gctctccagaggcagtctgca

SEQ ID NO: 9206 - RNA, 21 nt, synthetic construct
  misc_feature 1..21: note = Synthetic
  source 1..21: mol_type = other RNA
ctctccagaggcagtctgcac

SEQ ID NO: 9207 - RNA, 21 nt, synthetic construct
  misc_feature 1..21: note = Synthetic
  source 1..21: mol_type = other RNA
tctccagaggcagtctgcacc

SEQ ID NO: 9208 - RNA, 21 nt, synthetic construct
  misc_feature 1..21: note = Synthetic
  source 1..21: mol_type = other RNA
ctccagaggcagtctgcacct

SEQ ID NO: 9209 - RNA, 21 nt, synthetic construct
  misc_feature 1..21: note = Synthetic
  source 1..21: mol_type = other RNA
tccagaggcagtctgcacctt

SEQ ID NO: 9210 - RNA, 21 nt, synthetic construct
  misc_feature 1..21: note = Synthetic
  source 1..21: mol_type = other RNA
ccagaggcagtctgcaccttg

SEQ ID NO: 9211 - RNA, 21 nt, synthetic construct
  misc_feature 1..21: note = Synthetic
  source 1..21: mol_type = other RNA
cagaggcagtctgcaccttgc

SEQ ID NO: 9212 - RNA, 21 nt, synthetic construct
  misc_feature 1..21: note = Synthetic
  source 1..21: mol_type = other RNA
agaggcagtctgcaccttgcc

SEQ ID NO: 9213 - RNA, 21 nt, synthetic construct
  misc_feature 1..21: note = Synthetic
  source 1..21: mol_type = other RNA
gaggcagtctgcaccttgcct

SEQ ID NO: 9214 - RNA, 21 nt, synthetic construct
  misc_feature 1..21: note = Synthetic
  source 1..21: mol_type = other RNA
aggcagtctgcaccttgcctc

SEQ ID NO: 9215 - RNA, 21 nt, synthetic construct
  misc_feature 1..21: note = Synthetic
  source 1..21: mol_type = other RNA
ggcagtctgcaccttgcctcc

SEQ ID NO: 9216 - RNA, 21 nt, synthetic construct
  misc_feature 1..21: note = Synthetic
  source 1..21: mol_type = other RNA
gcagtctgcaccttgcctcct

SEQ ID NO: 9217 - RNA, 21 nt, synthetic construct
  misc_feature 1..21: note = Synthetic
  source 1..21: mol_type = other RNA
cagtctgcaccttgcctcctt

SEQ ID NO: 9218 - RNA, 21 nt, synthetic construct
  misc_feature 1..21: note = Synthetic
  source 1..21: mol_type = other RNA
agtctgcaccttgcctccttc

SEQ ID NO: 9219 - RNA, 21 nt, synthetic construct
  misc_feature 1..21: note = Synthetic
  source 1..21: mol_type = other RNA
gtctgcaccttgcctccttcg

SEQ ID NO: 9220 - RNA, 21 nt, synthetic construct
  misc_feature 1..21: note = Synthetic
  source 1..21: mol_type = other RNA
tctgcaccttgcctccttcgc

SEQ ID NO: 9221 - RNA, 21 nt, synthetic construct
  misc_feature 1..21: note = Synthetic
  source 1..21: mol_type = other RNA
ctgcaccttgcctccttcgct

SEQ ID NO: 9222 - RNA, 21 nt, synthetic construct
  misc_feature 1..21: note = Synthetic
  source 1..21: mol_type = other RNA
tgcaccttgcctccttcgctc

SEQ ID NO: 9223 - RNA, 21 nt, synthetic construct
  misc_feature 1..21: note = Synthetic
  source 1..21: mol_type = other RNA
gcaccttgcctccttcgctcg

SEQ ID NO: 9224 - RNA, 21 nt, synthetic construct
  misc_feature 1..21: note = Synthetic
  source 1..21: mol_type = other RNA
caccttgcctccttcgctcga

SEQ ID NO: 9225 - RNA, 21 nt, synthetic construct
  misc_feature 1..21: note = Synthetic
  source 1..21: mol_type = other RNA
accttgcctccttcgctcgag

SEQ ID NO: 9226 - RNA, 21 nt, synthetic construct
  misc_feature 1..21: note = Synthetic
  source 1..21: mol_type = other RNA
ccttgcctccttcgctcgagc

SEQ ID NO: 9227 - RNA, 21 nt, synthetic construct
  misc_feature 1..21: note = Synthetic
  source 1..21: mol_type = other RNA
cttgcctccttcgctcgagcc

SEQ ID NO: 9228 - RNA, 21 nt, synthetic construct
  misc_feature 1..21: note = Synthetic
  source 1..21: mol_type = other RNA
ttgcctccttcgctcgagccc

SEQ ID NO: 9229 - RNA, 21 nt, synthetic construct
  misc_feature 1..21: note = Synthetic
  source 1..21: mol_type = other RNA
tgcctccttcgctcgagcccc

SEQ ID NO: 9230 - RNA, 21 nt, synthetic construct
  misc_feature 1..21: note = Synthetic
  source 1..21: mol_type = other RNA
gcctccttcgctcgagcccca

SEQ ID NO: 9231 - RNA, 21 nt, synthetic construct
  misc_feature 1..21: note = Synthetic
  source 1..21: mol_type = other RNA
cctccttcgctcgagccccag

SEQ ID NO: 9232 - RNA, 21 nt, synthetic construct
  misc_feature 1..21: note = Synthetic
  source 1..21: mol_type = other RNA
ctccttcgctcgagccccagc

SEQ ID NO: 9233 - RNA, 21 nt, synthetic construct
  misc_feature 1..21: note = Synthetic
  source 1..21: mol_type = other RNA
tccttcgctcgagccccagcc

SEQ ID NO: 9234 - RNA, 21 nt, synthetic construct
  misc_feature 1..21: note = Synthetic
  source 1..21: mol_type = other RNA
ccttcgctcgagccccagccc

SEQ ID NO: 9235 - RNA, 21 nt, synthetic construct
  misc_feature 1..21: note = Synthetic
  source 1..21: mol_type = other RNA
cttcgctcgagccccagcccc

SEQ ID NO: 9236 - RNA, 21 nt, synthetic construct
  misc_feature 1..21: note = Synthetic
  source 1..21: mol_type = other RNA
ttcgctcgagccccagccccc

SEQ ID NO: 9237 - RNA, 21 nt, synthetic construct
  misc_feature 1..21: note = Synthetic
  source 1..21: mol_type = other RNA
tcgctcgagccccagccccca

SEQ ID NO: 9238 - RNA, 21 nt, synthetic construct
  misc_feature 1..21: note = Synthetic
  source 1..21: mol_type = other RNA
cgctcgagccccagcccccag

SEQ ID NO: 9239 - RNA, 21 nt, synthetic construct
  misc_feature 1..21: note = Synthetic
  source 1..21: mol_type = other RNA
gctcgagccccagcccccaga

SEQ ID NO: 9240 - RNA, 21 nt, synthetic construct
  misc_feature 1..21: note = Synthetic
  source 1..21: mol_type = other RNA
ctcgagccccagcccccagac

SEQ ID NO: 9241 - RNA, 21 nt, synthetic construct
  misc_feature 1..21: note = Synthetic
  source 1..21: mol_type = other RNA
tcgagccccagcccccagact

SEQ ID NO: 9242 - RNA, 21 nt, synthetic construct
  misc_feature 1..21: note = Synthetic
  source 1..21: mol_type = other RNA
cgagccccagcccccagactc

SEQ ID NO: 9243 - RNA, 21 nt, synthetic construct
  misc_feature 1..21: note = Synthetic
  source 1..21: mol_type = other RNA
gagccccagcccccagactcg

SEQ ID NO: 9244 - RNA, 21 nt, synthetic construct
  misc_feature 1..21: note = Synthetic
  source 1..21: mol_type = other RNA
agccccagcccccagactcgg

SEQ ID NO: 9245 - RNA, 21 nt, synthetic construct
  misc_feature 1..21: note = Synthetic
  source 1..21: mol_type = other RNA
gccccagcccccagactcggg

SEQ ID NO: 9246 - RNA, 21 nt, synthetic construct
  misc_feature 1..21: note = Synthetic
  source 1..21: mol_type = other RNA
ccccagcccccagactcgggc

SEQ ID NO: 9247 - RNA, 21 nt, synthetic construct
  misc_feature 1..21: note = Synthetic
  source 1..21: mol_type = other RNA
cccagcccccagactcgggca

SEQ ID NO: 9248 - RNA, 21 nt, synthetic construct
  misc_feature 1..21: note = Synthetic
  source 1..21: mol_type = other RNA
ccagcccccagactcgggcaa

SEQ ID NO: 9249 - RNA, 21 nt, synthetic construct
  misc_feature 1..21: note = Synthetic
  source 1..21: mol_type = other RNA
cagcccccagactcgggcaat

SEQ ID NO: 9250 - RNA, 21 nt, synthetic construct
  misc_feature 1..21: note = Synthetic
  source 1..21: mol_type = other RNA
agcccccagactcgggcaata

SEQ ID NO: 9251 - RNA, 21 nt, synthetic construct
  misc_feature 1..21: note = Synthetic
  source 1..21: mol_type = other RNA
gcccccagactcgggcaatac

SEQ ID NO: 9252 - RNA, 21 nt, synthetic construct
  misc_feature 1..21: note = Synthetic
  source 1..21: mol_type = other RNA
cccccagactcgggcaatacc

SEQ ID NO: 9253 - RNA, 21 nt, synthetic construct
  misc_feature 1..21: note = Synthetic
  source 1..21: mol_type = other RNA
ccccagactcgggcaataccc

SEQ ID NO: 9254 - RNA, 21 nt, synthetic construct
  misc_feature 1..21: note = Synthetic
  source 1..21: mol_type = other RNA
agacaggcagaaccagtacat

SEQ ID NO: 9255 - RNA, 21 nt, synthetic construct
  misc_feature 1..21: note = Synthetic
  source 1..21: mol_type = other RNA
gacaggcagaaccagtacatt

SEQ ID NO: 9256 - RNA, 21 nt, synthetic construct
  misc_feature 1..21: note = Synthetic
  source 1..21: mol_type = other RNA
acaggcagaaccagtacattt

SEQ ID NO: 9257 - RNA, 21 nt, synthetic construct
  misc_feature 1..21: note = Synthetic
  source 1..21: mol_type = other RNA
caggcagaaccagtacatttt

SEQ ID NO: 9258 - RNA, 21 nt, synthetic construct
  misc_feature 1..21: note = Synthetic
  source 1..21: mol_type = other RNA
aggcagaaccagtacattttg

SEQ ID NO: 9259 - RNA, 21 nt, synthetic construct
  misc_feature 1..21: note = Synthetic
  source 1..21: mol_type = other RNA
ggcagaaccagtacattttga

SEQ ID NO: 9260 - RNA, 21 nt, synthetic construct
  misc_feature 1..21: note = Synthetic
  source 1..21: mol_type = other RNA
gcagaaccagtacattttgag

SEQ ID NO: 9261 - RNA, 21 nt, synthetic construct
  misc_feature 1..21: note = Synthetic
  source 1..21: mol_type = other RNA
cagaaccagtacattttgagg

SEQ ID NO: 9262 - RNA, 21 nt, synthetic construct
  misc_feature 1..21: note = Synthetic
  source 1..21: mol_type = other RNA
agaaccagtacattttgagga

SEQ ID NO: 9263 - RNA, 21 nt, synthetic construct
  misc_feature 1..21: note = Synthetic
  source 1..21: mol_type = other RNA
gaaccagtacattttgaggag

SEQ ID NO: 9264 - RNA, 21 nt, synthetic construct
  misc_feature 1..21: note = Synthetic
  source 1..21: mol_type = other RNA
aaccagtacattttgaggaga

SEQ ID NO: 9265 - RNA, 21 nt, synthetic construct
  misc_feature 1..21: note = Synthetic
  source 1..21: mol_type = other RNA
accagtacattttgaggagaa

SEQ ID NO: 9266 - RNA, 21 nt, synthetic construct
  misc_feature 1..21: note = Synthetic
  source 1..21: mol_type = other RNA
ccagtacattttgaggagaag

SEQ ID NO: 9267 - RNA, 21 nt, synthetic construct
  misc_feature 1..21: note = Synthetic
  source 1..21: mol_type = other RNA
cagtacattttgaggagaaga

SEQ ID NO: 9268 - RNA, 21 nt, synthetic construct
  misc_feature 1..21: note = Synthetic
  source 1..21: mol_type = other RNA
agtacattttgaggagaagag

SEQ ID NO: 9269 - RNA, 21 nt, synthetic construct
  misc_feature 1..21: note = Synthetic
  source 1..21: mol_type = other RNA
gtacattttgaggagaagagg

SEQ ID NO: 9270 - RNA, 21 nt, synthetic construct
  misc_feature 1..21: note = Synthetic
  source 1..21: mol_type = other RNA
tacattttgaggagaagaggt

SEQ ID NO: 9271 - RNA, 21 nt, synthetic construct
  misc_feature 1..21: note = Synthetic
  source 1..21: mol_type = other RNA
acattttgaggagaagaggtt

SEQ ID NO: 9272 - RNA, 21 nt, synthetic construct
  misc_feature 1..21: note = Synthetic
  source 1..21: mol_type = other RNA
cattttgaggagaagaggttg

SEQ ID NO: 9273 - RNA, 21 nt, synthetic construct
  misc_feature 1..21: note = Synthetic
  source 1..21: mol_type = other RNA
attttgaggagaagaggttgc

SEQ ID NO: 9274 - RNA, 21 nt, synthetic construct
  misc_feature 1..21: note = Synthetic
  source 1..21: mol_type = other RNA
ttttgaggagaagaggttgca

SEQ ID NO: 9275 - RNA, 21 nt, synthetic construct
  misc_feature 1..21: note = Synthetic
  source 1..21: mol_type = other RNA
tttgaggagaagaggttgcac

SEQ ID NO: 9276 - RNA, 21 nt, synthetic construct
  misc_feature 1..21: note = Synthetic
  source 1..21: mol_type = other RNA
ttgaggagaagaggttgcacc

SEQ ID NO: 9277 - RNA, 21 nt, synthetic construct
  misc_feature 1..21: note = Synthetic
  source 1..21: mol_type = other RNA
tgaggagaagaggttgcaccc

SEQ ID NO: 9278 - RNA, 21 nt, synthetic construct
  misc_feature 1..21: note = Synthetic
  source 1..21: mol_type = other RNA
gaggagaagaggttgcaccct

SEQ ID NO: 9279 - RNA, 21 nt, synthetic construct
  misc_feature 1..21: note = Synthetic
  source 1..21: mol_type = other RNA
aggagaagaggttgcaccctc

SEQ ID NO: 9280 - RNA, 21 nt, synthetic construct
  misc_feature 1..21: note = Synthetic
  source 1..21: mol_type = other RNA
ggagaagaggttgcaccctca

SEQ ID NO: 9281 - RNA, 21 nt, synthetic construct
  misc_feature 1..21: note = Synthetic
  source 1..21: mol_type = other RNA
gagaagaggttgcaccctcag

SEQ ID NO: 9282 - RNA, 21 nt, synthetic construct
  misc_feature 1..21: note = Synthetic
  source 1..21: mol_type = other RNA
agaagaggttgcaccctcaga

SEQ ID NO: 9283 - RNA, 21 nt, synthetic construct
  misc_feature 1..21: note = Synthetic
  source 1..21: mol_type = other RNA
gaagaggttgcaccctcagag

SEQ ID NO: 9284 - RNA, 21 nt, synthetic construct
  misc_feature 1..21: note = Synthetic
  source 1..21: mol_type = other RNA
aagaggttgcaccctcagagg

SEQ ID NO: 9285 - RNA, 21 nt, synthetic construct
  misc_feature 1..21: note = Synthetic
  source 1..21: mol_type = other RNA
agaggttgcaccctcagaggt

SEQ ID NO: 9286 - RNA, 21 nt, synthetic construct
  misc_feature 1..21: note = Synthetic
  source 1..21: mol_type = other RNA
gaggttgcaccctcagaggta

SEQ ID NO: 9287 - RNA, 21 nt, synthetic construct
  misc_feature 1..21: note = Synthetic
  source 1..21: mol_type = other RNA
aggttgcaccctcagaggtaa

SEQ ID NO: 9288 - RNA, 21 nt, synthetic construct
  misc_feature 1..21: note = Synthetic
  source 1..21: mol_type = other RNA
ggttgcaccctcagaggtaaa

SEQ ID NO: 9289 - RNA, 21 nt, synthetic construct
  misc_feature 1..21: note = Synthetic
  source 1..21: mol_type = other RNA
gttgcaccctcagaggtaaag

SEQ ID NO: 9290 - RNA, 21 nt, synthetic construct
  misc_feature 1..21: note = Synthetic
  source 1..21: mol_type = other RNA
ttgcaccctcagaggtaaagt

SEQ ID NO: 9291 - RNA, 21 nt, synthetic construct
  misc_feature 1..21: note = Synthetic
  source 1..21: mol_type = other RNA
tgcaccctcagaggtaaagta

SEQ ID NO: 9292 - RNA, 21 nt, synthetic construct
  misc_feature 1..21: note = Synthetic
  source 1..21: mol_type = other RNA
gcaccctcagaggtaaagtaa

SEQ ID NO: 9293 - RNA, 21 nt, synthetic construct
  misc_feature 1..21: note = Synthetic
  source 1..21: mol_type = other RNA
caccctcagaggtaaagtaac

SEQ ID NO: 9294 - RNA, 21 nt, synthetic construct
  misc_feature 1..21: note = Synthetic
  source 1..21: mol_type = other RNA
accctcagaggtaaagtaacc

SEQ ID NO: 9295 - RNA, 21 nt, synthetic construct
  misc_feature 1..21: note = Synthetic
  source 1..21: mol_type = other RNA
ccctcagaggtaaagtaacct

SEQ ID NO: 9296 - RNA, 21 nt, synthetic construct
  misc_feature 1..21: note = Synthetic
  source 1..21: mol_type = other RNA
cctcagaggtaaagtaacctg

SEQ ID NO: 9297 - RNA, 21 nt, synthetic construct
  misc_feature 1..21: note = Synthetic
  source 1..21: mol_type = other RNA
ctcagaggtaaagtaacctga

SEQ ID NO: 9298 - RNA, 21 nt, synthetic construct
  misc_feature 1..21: note = Synthetic
  source 1..21: mol_type = other RNA
tcagaggtaaagtaacctgag

SEQ ID NO: 9299 - RNA, 21 nt, synthetic construct
  misc_feature 1..21: note = Synthetic
  source 1..21: mol_type = other RNA
cagaggtaaagtaacctgagg

SEQ ID NO: 9300 - RNA, 21 nt, synthetic construct
  misc_feature 1..21: note = Synthetic
  source 1..21: mol_type = other RNA
agaggtaaagtaacctgaggg

SEQ ID NO: 9301 - RNA, 21 nt, synthetic construct
  misc_feature 1..21: note = Synthetic
  source 1..21: mol_type = other RNA
gaggtaaagtaacctgagggt

SEQ ID NO: 9302 - RNA, 21 nt, synthetic construct
  misc_feature 1..21: note = Synthetic
  source 1..21: mol_type = other RNA
aggtaaagtaacctgagggtt

SEQ ID NO: 9303 - RNA, 21 nt, synthetic construct
  misc_feature 1..21: note = Synthetic
  source 1..21: mol_type = other RNA
ggtaaagtaacctgagggtta

SEQ ID NO: 9304 - RNA, 21 nt, synthetic construct
  misc_feature 1..21: note = Synthetic
  source 1..21: mol_type = other RNA
gtaaagtaacctgagggttat

SEQ ID NO: 9305 - RNA, 21 nt, synthetic construct
  misc_feature 1..21: note = Synthetic
  source 1..21: mol_type = other RNA
taaagtaacctgagggttatg

SEQ ID NO: 9306 - RNA, 21 nt, synthetic construct
  misc_feature 1..21: note = Synthetic
  source 1..21: mol_type = other RNA
aaagtaacctgagggttatgt

SEQ ID NO: 9307 - RNA, 21 nt, synthetic construct
  misc_feature 1..21: note = Synthetic
  source 1..21: mol_type = other RNA
aagtaacctgagggttatgtc

SEQ ID NO: 9308 - RNA, 21 nt, synthetic construct
  misc_feature 1..21: note = Synthetic
  source 1..21: mol_type = other RNA
agtaacctgagggttatgtct

SEQ ID NO: 9309 - RNA, 21 nt, synthetic construct
  misc_feature 1..21: note = Synthetic
  source 1..21: mol_type = other RNA
gtaacctgagggttatgtctg

SEQ ID NO: 9310 - RNA, 21 nt, synthetic construct
  misc_feature 1..21: note = Synthetic
  source 1..21: mol_type = other RNA
taacctgagggttatgtctgg

SEQ ID NO: 9311 - RNA, 21 nt, synthetic construct
  misc_feature 1..21: note = Synthetic
  source 1..21: mol_type = other RNA
aacctgagggttatgtctggc

SEQ ID NO: 9312 - RNA, 21 nt, synthetic construct
  misc_feature 1..21: note = Synthetic
  source 1..21: mol_type = other RNA
acctgagggttatgtctggcc

SEQ ID NO: 9313 - RNA, 21 nt, synthetic construct
  misc_feature 1..21: note = Synthetic
  source 1..21: mol_type = other RNA
cctgagggttatgtctggccc

SEQ ID NO: 9314 - RNA, 21 nt, synthetic construct
  misc_feature 1..21: note = Synthetic
  source 1..21: mol_type = other RNA
ctgagggttatgtctggccca

SEQ ID NO: 9315 - RNA, 21 nt, synthetic construct
  misc_feature 1..21: note = Synthetic
  source 1..21: mol_type = other RNA
tgagggttatgtctggcccag

SEQ ID NO: 9316 - RNA, 21 nt, synthetic construct
  misc_feature 1..21: note = Synthetic
  source 1..21: mol_type = other RNA
gagggttatgtctggcccagt

SEQ ID NO: 9317 - RNA, 21 nt, synthetic construct
  misc_feature 1..21: note = Synthetic
  source 1..21: mol_type = other RNA
agggttatgtctggcccagta

SEQ ID NO: 9318 - RNA, 21 nt, synthetic construct
  misc_feature 1..21: note = Synthetic
  source 1..21: mol_type = other RNA
gggttatgtctggcccagtat

SEQ ID NO: 9319 - RNA, 21 nt, synthetic construct
  misc_feature 1..21: note = Synthetic
  source 1..21: mol_type = other RNA
ggttatgtctggcccagtatt

SEQ ID NO: 9320 - RNA, 21 nt, synthetic construct
  misc_feature 1..21: note = Synthetic
  source 1..21: mol_type = other RNA
gttatgtctggcccagtattt

SEQ ID NO: 9321 - RNA, 21 nt, synthetic construct
  misc_feature 1..21: note = Synthetic
  source 1..21: mol_type = other RNA
ttatgtctggcccagtatttt

SEQ ID NO: 9322 - RNA, 21 nt, synthetic construct
  misc_feature 1..21: note = Synthetic
  source 1..21: mol_type = other RNA
tatgtctggcccagtattttt

SEQ ID NO: 9323 - RNA, 21 nt, synthetic construct
  misc_feature 1..21: note = Synthetic
  source 1..21: mol_type = other RNA
atgtctggcccagtatttttt

SEQ ID NO: 9324 - RNA, 21 nt, synthetic construct
  misc_feature 1..21: note = Synthetic
  source 1..21: mol_type = other RNA
tgtctggcccagtatttttta

SEQ ID NO: 9325 - RNA, 21 nt, synthetic construct
  misc_feature 1..21: note = Synthetic
  source 1..21: mol_type = other RNA
gtctggcccagtattttttaa

SEQ ID NO: 9326 - RNA, 21 nt, synthetic construct
  misc_feature 1..21: note = Synthetic
  source 1..21: mol_type = other RNA
tctggcccagtattttttaaa

SEQ ID NO: 9327 - RNA, 21 nt, synthetic construct
  misc_feature 1..21: note = Synthetic
  source 1..21: mol_type = other RNA
ctggcccagtattttttaaat

SEQ ID NO: 9328 - RNA, 21 nt, synthetic construct
  misc_feature 1..21: note = Synthetic
  source 1..21: mol_type = other RNA
tggcccagtattttttaaatt

SEQ ID NO: 9329 - RNA, 21 nt, synthetic construct
  misc_feature 1..21: note = Synthetic
  source 1..21: mol_type = other RNA
ggcccagtattttttaaattt

SEQ ID NO: 9330 - RNA, 21 nt, synthetic construct
  misc_feature 1..21: note = Synthetic
  source 1..21: mol_type = other RNA
gcccagtattttttaaatttc

SEQ ID NO: 9331 - RNA, 21 nt, synthetic construct
  misc_feature 1..21: note = Synthetic
  source 1..21: mol_type = other RNA
cccagtattttttaaatttct

SEQ ID NO: 9332 - RNA, 21 nt, synthetic construct
  misc_feature 1..21: note = Synthetic
  source 1..21: mol_type = other RNA
ccagtattttttaaatttctg

SEQ ID NO: 9333 - RNA, 21 nt, synthetic construct
  misc_feature 1..21: note = Synthetic
  source 1..21: mol_type = other RNA
cagtattttttaaatttctga

SEQ ID NO: 9334 - RNA, 21 nt, synthetic construct
  misc_feature 1..21: note = Synthetic
  source 1..21: mol_type = other RNA
agtattttttaaatttctgaa

SEQ ID NO: 9335 - RNA, 21 nt, synthetic construct
  misc_feature 1..21: note = Synthetic
  source 1..21: mol_type = other RNA
gtattttttaaatttctgaat

SEQ ID NO: 9336 - RNA, 21 nt, synthetic construct
  misc_feature 1..21: note = Synthetic
  source 1..21: mol_type = other RNA
tattttttaaatttctgaatg

SEQ ID NO: 9337 - RNA, 21 nt, synthetic construct
  misc_feature 1..21: note = Synthetic
  source 1..21: mol_type = other RNA
attttttaaatttctgaatgc

SEQ ID NO: 9338 - RNA, 21 nt, synthetic construct
  misc_feature 1..21: note = Synthetic
  source 1..21: mol_type = other RNA
ttttttaaatttctgaatgca

SEQ ID NO: 9339 - RNA, 21 nt, synthetic construct
  misc_feature 1..21: note = Synthetic
  source 1..21: mol_type = other RNA
tttttaaatttctgaatgcaa

SEQ ID NO: 9340 - RNA, 21 nt, synthetic construct
  misc_feature 1..21: note = Synthetic
  source 1..21: mol_type = other RNA
ttttaaatttctgaatgcaaa

SEQ ID NO: 9341 - RNA, 21 nt, synthetic construct
  misc_feature 1..21: note = Synthetic
  source 1..21: mol_type = other RNA
tttaaatttctgaatgcaaat

SEQ ID NO: 9342 - RNA, 21 nt, synthetic construct
  misc_feature 1..21: note = Synthetic
  source 1..21: mol_type = other RNA
cgtaggtgtaggtttctcctg

SEQ ID NO: 9343 - RNA, 21 nt, synthetic construct
  misc_feature 1..21: note = Synthetic
  source 1..21: mol_type = other RNA
gtaggtgtaggtttctcctgg

SEQ ID NO: 9344 - RNA, 21 nt, synthetic construct
  misc_feature 1..21: note = Synthetic
  source 1..21: mol_type = other RNA
taggtgtaggtttctcctggg

SEQ ID NO: 9345 - RNA, 21 nt, synthetic construct
  misc_feature 1..21: note = Synthetic
  source 1..21: mol_type = other RNA
aggtgtaggtttctcctgggt

SEQ ID NO: 9346 - RNA, 21 nt, synthetic construct
  misc_feature 1..21: note = Synthetic
  source 1..21: mol_type = other RNA
ggtgtaggtttctcctgggta

SEQ ID NO: 9347 - RNA, 21 nt, synthetic construct
  misc_feature 1..21: note = Synthetic
  source 1..21: mol_type = other RNA
gtgtaggtttctcctgggtat

SEQ ID NO: 9348 - RNA, 21 nt, synthetic construct
  misc_feature 1..21: note = Synthetic
  source 1..21: mol_type = other RNA
tgtaggtttctcctgggtatg

SEQ ID NO: 9349 - RNA, 21 nt, synthetic construct
  misc_feature 1..21: note = Synthetic
  source 1..21: mol_type = other RNA
gtaggtttctcctgggtatgg

SEQ ID NO: 9350 - RNA, 21 nt, synthetic construct
  misc_feature 1..21: note = Synthetic
  source 1..21: mol_type = other RNA
taggtttctcctgggtatggt

SEQ ID NO: 9351 - RNA, 21 nt, synthetic construct
  misc_feature 1..21: note = Synthetic
  source 1..21: mol_type = other RNA
aggtttctcctgggtatggtg

SEQ ID NO: 9352 - RNA, 21 nt, synthetic construct
  misc_feature 1..21: note = Synthetic
  source 1..21: mol_type = other RNA
ggtttctcctgggtatggtgc

SEQ ID NO: 9353 - RNA, 21 nt, synthetic construct
  misc_feature 1..21: note = Synthetic
  source 1..21: mol_type = other RNA
gtttctcctgggtatggtgct

SEQ ID NO: 9354 - RNA, 21 nt, synthetic construct
  misc_feature 1..21: note = Synthetic
  source 1..21: mol_type = other RNA
tttctcctgggtatggtgctg

SEQ ID NO: 9355 - RNA, 21 nt, synthetic construct
  misc_feature 1..21: note = Synthetic
  source 1..21: mol_type = other RNA
ttctcctgggtatggtgctga

SEQ ID NO: 9356 - RNA, 21 nt, synthetic construct
  misc_feature 1..21: note = Synthetic
  source 1..21: mol_type = other RNA
tctcctgggtatggtgctgag

SEQ ID NO: 9357 - RNA, 21 nt, synthetic construct
  misc_feature 1..21: note = Synthetic
  source 1..21: mol_type = other RNA
ctcctgggtatggtgctgagg

SEQ ID NO: 9358 - RNA, 21 nt, synthetic construct
  misc_feature 1..21: note = Synthetic
  source 1..21: mol_type = other RNA
tcctgggtatggtgctgaggt

SEQ ID NO: 9359 - RNA, 21 nt, synthetic construct
  misc_feature 1..21: note = Synthetic
  source 1..21: mol_type = other RNA
cctgggtatggtgctgaggtg

SEQ ID NO: 9360 - RNA, 21 nt, synthetic construct
  misc_feature 1..21: note = Synthetic
  source 1..21: mol_type = other RNA
gacaggcagaaccagtacact

SEQ ID NO: 9361 - RNA, 21 nt, synthetic construct
  misc_feature 1..21: note = Synthetic
  source 1..21: mol_type = other RNA
acaggcagaaccagtacactc

SEQ ID NO: 9362 - RNA, 21 nt, synthetic construct
  misc_feature 1..21: note = Synthetic
  source 1..21: mol_type = other RNA
caggcagaaccagtacactct

SEQ ID NO: 9363 - RNA, 21 nt, synthetic construct
  misc_feature 1..21: note = Synthetic
  source 1..21: mol_type = other RNA
aggcagaaccagtacactctc

SEQ ID NO: 9364 - RNA, 21 nt, synthetic construct
  misc_feature 1..21: note = Synthetic
  source 1..21: mol_type = other RNA
ggcagaaccagtacactctcg

SEQ ID NO: 9365 - RNA, 21 nt, synthetic construct
  misc_feature 1..21: note = Synthetic
  source 1..21: mol_type = other RNA
gcagaaccagtacactctcgc

SEQ ID NO: 9366 - RNA, 21 nt, synthetic construct
  misc_feature 1..21: note = Synthetic
  source 1..21: mol_type = other RNA
cagaaccagtacactctcgcc

SEQ ID NO: 9367 - RNA, 21 nt, synthetic construct
  misc_feature 1..21: note = Synthetic
  source 1..21: mol_type = other RNA
agaaccagtacactctcgcct

SEQ ID NO: 9368 - RNA, 21 nt, synthetic construct
  misc_feature 1..21: note = Synthetic
  source 1..21: mol_type = other RNA
gaaccagtacactctcgcctc

SEQ ID NO: 9369 - RNA, 21 nt, synthetic construct
  misc_feature 1..21: note = Synthetic
  source 1..21: mol_type = other RNA
aaccagtacactctcgcctca

SEQ ID NO: 9370 - RNA, 21 nt, synthetic construct
  misc_feature 1..21: note = Synthetic
  source 1..21: mol_type = other RNA
accagtacactctcgcctcag

SEQ ID NO: 9371 - RNA, 21 nt, synthetic construct
  misc_feature 1..21: note = Synthetic
  source 1..21: mol_type = other RNA
ccagtacactctcgcctcagc

SEQ ID NO: 9372 - RNA, 21 nt, synthetic construct
  misc_feature 1..21: note = Synthetic
  source 1..21: mol_type = other RNA
cagtacactctcgcctcagcc

SEQ ID NO: 9373 - RNA, 21 nt, synthetic construct
  misc_feature 1..21: note = Synthetic
  source 1..21: mol_type = other RNA
agtacactctcgcctcagcct

SEQ ID NO: 9374 - RNA, 21 nt, synthetic construct
  misc_feature 1..21: note = Synthetic
  source 1..21: mol_type = other RNA
gtacactctcgcctcagcctc

SEQ ID NO: 9375 - RNA, 21 nt, synthetic construct
  misc_feature 1..21: note = Synthetic
  source 1..21: mol_type = other RNA
tacactctcgcctcagcctcc

SEQ ID NO: 9376 - RNA, 21 nt, synthetic construct
  misc_feature 1..21: note = Synthetic
  source 1..21: mol_type = other RNA
acactctcgcctcagcctccc

SEQ ID NO: 9377 - RNA, 21 nt, synthetic construct
  misc_feature 1..21: note = Synthetic
  source 1..21: mol_type = other RNA
cactctcgcctcagcctccct

SEQ ID NO: 9378 - RNA, 21 nt, synthetic construct
  misc_feature 1..21: note = Synthetic
  source 1..21: mol_type = other RNA
actctcgcctcagcctccctg

SEQ ID NO: 9379 - RNA, 21 nt, synthetic construct
  misc_feature 1..21: note = Synthetic
  source 1..21: mol_type = other RNA
acaggcagaaccagtacacta

SEQ ID NO: 9380 - RNA, 21 nt, synthetic construct
  misc_feature 1..21: note = Synthetic
  source 1..21: mol_type = other RNA
caggcagaaccagtacactat

SEQ ID NO: 9381 - RNA, 21 nt, synthetic construct
  misc_feature 1..21: note = Synthetic
  source 1..21: mol_type = other RNA
aggcagaaccagtacactatg

SEQ ID NO: 9382 - RNA, 21 nt, synthetic construct
  misc_feature 1..21: note = Synthetic
  source 1..21: mol_type = other RNA
ggcagaaccagtacactatgt

SEQ ID NO: 9383 - RNA, 21 nt, synthetic construct
  misc_feature 1..21: note = Synthetic
  source 1..21: mol_type = other RNA
gcagaaccagtacactatgtg

SEQ ID NO: 9384 - RNA, 21 nt, synthetic construct
  misc_feature 1..21: note = Synthetic
  source 1..21: mol_type = other RNA
cagaaccagtacactatgtgg

SEQ ID NO: 9385 - RNA, 21 nt, synthetic construct
  misc_feature 1..21: note = Synthetic
  source 1..21: mol_type = other RNA
agaaccagtacactatgtggt

SEQ ID NO: 9386 - RNA, 21 nt, synthetic construct
  misc_feature 1..21: note = Synthetic
  source 1..21: mol_type = other RNA
gaaccagtacactatgtggta

SEQ ID NO: 9387 - RNA, 21 nt, synthetic construct
  misc_feature 1..21: note = Synthetic
  source 1..21: mol_type = other RNA
aaccagtacactatgtggtag

SEQ ID NO: 9388 - RNA, 21 nt, synthetic construct
  misc_feature 1..21: note = Synthetic
  source 1..21: mol_type = other RNA
accagtacactatgtggtaga

SEQ ID NO: 9389 - RNA, 21 nt, synthetic construct
  misc_feature 1..21: note = Synthetic
  source 1..21: mol_type = other RNA
ccagtacactatgtggtagaa

SEQ ID NO: 9390 - RNA, 21 nt, synthetic construct
  misc_feature 1..21: note = Synthetic
  source 1..21: mol_type = other RNA
cagtacactatgtggtagaat

SEQ ID NO: 9391 - RNA, 21 nt, synthetic construct
  misc_feature 1..21: note = Synthetic
  source 1..21: mol_type = other RNA
agtacactatgtggtagaatg

SEQ ID NO: 9392 - RNA, 21 nt, synthetic construct
  misc_feature 1..21: note = Synthetic
  source 1..21: mol_type = other RNA
gtacactatgtggtagaatgg

SEQ ID NO: 9393 - RNA, 21 nt, synthetic construct
  misc_feature 1..21: note = Synthetic
  source 1..21: mol_type = other RNA
tacactatgtggtagaatgga

SEQ ID NO: 9394 - RNA, 21 nt, synthetic construct
  misc_feature 1..21: note = Synthetic
  source 1..21: mol_type = other RNA
acactatgtggtagaatggaa

SEQ ID NO: 9395 - RNA, 21 nt, synthetic construct
  misc_feature 1..21: note = Synthetic
  source 1..21: mol_type = other RNA
cactatgtggtagaatggaaa

SEQ ID NO: 9396 - RNA, 21 nt, synthetic construct
  misc_feature 1..21: note = Synthetic
  source 1..21: mol_type = other RNA
actatgtggtagaatggaaag

SEQ ID NO: 9397 - RNA, 21 nt, synthetic construct
  misc_feature 1..21: note = Synthetic
  source 1..21: mol_type = other RNA
ctatgtggtagaatggaaaga

SEQ ID NO: 9398 - RNA, 21 nt, synthetic construct
  misc_feature 1..21: note = Synthetic
  source 1..21: mol_type = other RNA
tatgtggtagaatggaaagag

SEQ ID NO: 9399 - RNA, 21 nt, synthetic construct
  misc_feature 1..21: note = Synthetic
  source 1..21: mol_type = other RNA
atgtggtagaatggaaagagt

SEQ ID NO: 9400 - RNA, 21 nt, synthetic construct
  misc_feature 1..21: note = Synthetic
  source 1..21: mol_type = other RNA
tgtggtagaatggaaagagta

SEQ ID NO: 9401 - RNA, 21 nt, synthetic construct
  misc_feature 1..21: note = Synthetic
  source 1..21: mol_type = other RNA
gtggtagaatggaaagagtac

SEQ ID NO: 9402 - RNA, 21 nt, synthetic construct
  misc_feature 1..21: note = Synthetic
  source 1..21: mol_type = other RNA
tggtagaatggaaagagtacc

SEQ ID NO: 9403 - RNA, 21 nt, synthetic construct
  misc_feature 1..21: note = Synthetic
  source 1..21: mol_type = other RNA
ggtagaatggaaagagtacca

SEQ ID NO: 9404 - RNA, 21 nt, synthetic construct
  misc_feature 1..21: note = Synthetic
  source 1..21: mol_type = other RNA
gtagaatggaaagagtaccag

SEQ ID NO: 9405 - RNA, 21 nt, synthetic construct
  misc_feature 1..21: note = Synthetic
  source 1..21: mol_type = other RNA
tagaatggaaagagtaccagc

SEQ ID NO: 9406 - RNA, 21 nt, synthetic construct
  misc_feature 1..21: note = Synthetic
  source 1..21: mol_type = other RNA
agaatggaaagagtaccagcc

SEQ ID NO: 9407 - RNA, 21 nt, synthetic construct
  misc_feature 1..21: note = Synthetic
  source 1..21: mol_type = other RNA
gaatggaaagagtaccagccc

SEQ ID NO: 9408 - RNA, 21 nt, synthetic construct
  misc_feature 1..21: note = Synthetic
  source 1..21: mol_type = other RNA
aatggaaagagtaccagcccg

SEQ ID NO: 9409 - RNA, 21 nt, synthetic construct
  misc_feature 1..21: note = Synthetic
  source 1..21: mol_type = other RNA
atggaaagagtaccagcccgc

SEQ ID NO: 9410 - RNA, 21 nt, synthetic construct
  misc_feature 1..21: note = Synthetic
  source 1..21: mol_type = other RNA
tggaaagagtaccagcccgca

SEQ ID NO: 9411 - RNA, 21 nt, synthetic construct
  misc_feature 1..21: note = Synthetic
  source 1..21: mol_type = other RNA
ggaaagagtaccagcccgcag

SEQ ID NO: 9412 - RNA, 21 nt, synthetic construct
  misc_feature 1..21: note = Synthetic
  source 1..21: mol_type = other RNA
gaaagagtaccagcccgcaga

SEQ ID NO: 9413 - RNA, 21 nt, synthetic construct
  misc_feature 1..21: note = Synthetic
  source 1..21: mol_type = other RNA
aaagagtaccagcccgcagac

SEQ ID NO: 9414 - RNA, 21 nt, synthetic construct
  misc_feature 1..21: note = Synthetic
  source 1..21: mol_type = other RNA
aagagtaccagcccgcagaca

SEQ ID NO: 9415 - RNA, 21 nt, synthetic construct
  misc_feature 1..21: note = Synthetic
  source 1..21: mol_type = other RNA
agagtaccagcccgcagacaa

SEQ ID NO: 9416 - RNA, 21 nt, synthetic construct
  misc_feature 1..21: note = Synthetic
  source 1..21: mol_type = other RNA
gagtaccagcccgcagacaag

SEQ ID NO: 9417 - RNA, 21 nt, synthetic construct
  misc_feature 1..21: note = Synthetic
  source 1..21: mol_type = other RNA
agtaccagcccgcagacaaga

SEQ ID NO: 9418 - RNA, 21 nt, synthetic construct
  misc_feature 1..21: note = Synthetic
  source 1..21: mol_type = other RNA
gtaccagcccgcagacaagaa

SEQ ID NO: 9419 - RNA, 21 nt, synthetic construct
  misc_feature 1..21: note = Synthetic
  source 1..21: mol_type = other RNA
taccagcccgcagacaagaag

SEQ ID NO: 9420 - DNA, 21 bp, synthetic construct
  misc_feature 1..21: note = Synthetic
  source 1..21: mol_type = other DNA
accagcccgcagacaagaaga

SEQ ID NO: 9421 - RNA, 21 nt, synthetic construct
  misc_feature 1..21: note = Synthetic
  source 1..21: mol_type = other RNA
ccagcccgcagacaagaagat

SEQ ID NO: 9422 - RNA, 21 nt, synthetic construct
  misc_feature 1..21: note = Synthetic
  source 1..21: mol_type = other RNA
cagcccgcagacaagaagatc

SEQ ID NO: 9423 - RNA, 21 nt, synthetic construct
  misc_feature 1..21: note = Synthetic
  source 1..21: mol_type = other RNA
agcccgcagacaagaagatct

SEQ ID NO: 9424 - RNA, 21 nt, synthetic construct
  misc_feature 1..21: note = Synthetic
  source 1..21: mol_type = other RNA
gcccgcagacaagaagatctc

SEQ ID NO: 9425 - RNA, 21 nt, synthetic construct
  misc_feature 1..21: note = Synthetic
  source 1..21: mol_type = other RNA
cccgcagacaagaagatctct

SEQ ID NO: 9426 - RNA, 21 nt, synthetic construct
  misc_feature 1..21: note = Synthetic
  source 1..21: mol_type = other RNA
ccgcagacaagaagatctctg

SEQ ID NO: 9427 - RNA, 21 nt, synthetic construct
  misc_feature 1..21: note = Synthetic
  source 1..21: mol_type = other RNA
cgcagacaagaagatctctga

SEQ ID NO: 9428 - RNA, 21 nt, synthetic construct
  misc_feature 1..21: note = Synthetic
  source 1..21: mol_type = other RNA
gcagacaagaagatctctgag

SEQ ID NO: 9429 - RNA, 21 nt, synthetic construct
  misc_feature 1..21: note = Synthetic
  source 1..21: mol_type = other RNA
cagacaagaagatctctgagt

SEQ ID NO: 9430 - RNA, 21 nt, synthetic construct
  misc_feature 1..21: note = Synthetic
  source 1..21: mol_type = other RNA
agacaagaagatctctgagtt

SEQ ID NO: 9431 - RNA, 21 nt, synthetic construct
  misc_feature 1..21: note = Synthetic
  source 1..21: mol_type = other RNA
gacaagaagatctctgagttt

SEQ ID NO: 9432 - RNA, 21 nt, synthetic construct
  misc_feature 1..21: note = Synthetic
  source 1..21: mol_type = other RNA
acaagaagatctctgagtttt

SEQ ID NO: 9433 - RNA, 21 nt, synthetic construct
  misc_feature 1..21: note = Synthetic
  source 1..21: mol_type = other RNA
caagaagatctctgagtttta

SEQ ID NO: 9434 - RNA, 21 nt, synthetic construct
  misc_feature 1..21: note = Synthetic
  source 1..21: mol_type = other RNA
aagaagatctctgagttttag

SEQ ID NO: 9435 - RNA, 21 nt, synthetic construct
  misc_feature 1..21: note = Synthetic
  source 1..21: mol_type = other RNA
agaagatctctgagttttagt

SEQ ID NO: 9436 - RNA, 21 nt, synthetic construct
  misc_feature 1..21: note = Synthetic
  source 1..21: mol_type = other RNA
gaagatctctgagttttagtt

SEQ ID NO: 9437 - RNA, 21 nt, synthetic construct
  misc_feature 1..21: note = Synthetic
  source 1..21: mol_type = other RNA
aagatctctgagttttagttg

SEQ ID NO: 9438 - RNA, 21 nt, synthetic construct
  misc_feature 1..21: note = Synthetic
  source 1..21: mol_type = other RNA
agatctctgagttttagttgc

SEQ ID NO: 9439 - RNA, 21 nt, synthetic construct
  misc_feature 1..21: note = Synthetic
  source 1..21: mol_type = other RNA
gatctctgagttttagttgca

SEQ ID NO: 9440 - RNA, 21 nt, synthetic construct
  misc_feature 1..21: note = Synthetic
  source 1..21: mol_type = other RNA
atctctgagttttagttgcag

SEQ ID NO: 9441 - RNA, 21 nt, synthetic construct
  misc_feature 1..21: note = Synthetic
  source 1..21: mol_type = other RNA
tctctgagttttagttgcagt

SEQ ID NO: 9442 - RNA, 21 nt, synthetic construct
  misc_feature 1..21: note = Synthetic
  source 1..21: mol_type = other RNA
ctctgagttttagttgcagtt

SEQ ID NO: 9443 - RNA, 21 nt, synthetic construct
  misc_feature 1..21: note = Synthetic
  source 1..21: mol_type = other RNA
tctgagttttagttgcagttc

SEQ ID NO: 9444 - RNA, 21 nt, synthetic construct
  misc_feature 1..21: note = Synthetic
  source 1..21: mol_type = other RNA
ctgagttttagttgcagttct

SEQ ID NO: 9445 - RNA, 21 nt, synthetic construct
  misc_feature 1..21: note = Synthetic
  source 1..21: mol_type = other RNA
tgagttttagttgcagttctg

SEQ ID NO: 9446 - RNA, 21 nt, synthetic construct
  misc_feature 1..21: note = Synthetic
  source 1..21: mol_type = other RNA
gagttttagttgcagttctgc

SEQ ID NO: 9447 - RNA, 21 nt, synthetic construct
  misc_feature 1..21: note = Synthetic
  source 1..21: mol_type = other RNA
agttttagttgcagttctgct

SEQ ID NO: 9448 - RNA, 21 nt, synthetic construct
  misc_feature 1..21: note = Synthetic
  source 1..21: mol_type = other RNA
gttttagttgcagttctgcta

SEQ ID NO: 9449 - RNA, 21 nt, synthetic construct
  misc_feature 1..21: note = Synthetic
  source 1..21: mol_type = other RNA
ttttagttgcagttctgctac

SEQ ID NO: 9450 - RNA, 21 nt, synthetic construct
  misc_feature 1..21: note = Synthetic
  source 1..21: mol_type = other RNA
tttagttgcagttctgctact

SEQ ID NO: 9451 - RNA, 21 nt, synthetic construct
  misc_feature 1..21: note = Synthetic
  source 1..21: mol_type = other RNA
ttagttgcagttctgctacta

SEQ ID NO: 9452 - RNA, 21 nt, synthetic construct
  misc_feature 1..21: note = Synthetic
  source 1..21: mol_type = other RNA
tagttgcagttctgctactaa

SEQ ID NO: 9453 - RNA, 21 nt, synthetic construct
  misc_feature 1..21: note = Synthetic
  source 1..21: mol_type = other RNA
agttgcagttctgctactaac

SEQ ID NO: 9454 - RNA, 21 nt, synthetic construct
  misc_feature 1..21: note = Synthetic
  source 1..21: mol_type = other RNA
gttgcagttctgctactaaca

SEQ ID NO: 9455 - RNA, 21 nt, synthetic construct
  misc_feature 1..21: note = Synthetic
  source 1..21: mol_type = other RNA
ttgcagttctgctactaacag

SEQ ID NO: 9456 - RNA, 21 nt, synthetic construct
  misc_feature 1..21: note = Synthetic
  source 1..21: mol_type = other RNA
tgcagttctgctactaacagc

SEQ ID NO: 9457 - RNA, 21 nt, synthetic construct
  misc_feature 1..21: note = Synthetic
  source 1..21: mol_type = other RNA
gcagttctgctactaacagct

SEQ ID NO: 9458 - RNA, 21 nt, synthetic construct
  misc_feature 1..21: note = Synthetic
  source 1..21: mol_type = other RNA
cagttctgctactaacagctt

SEQ ID NO: 9459 - RNA, 21 nt, synthetic construct
  misc_feature 1..21: note = Synthetic
  source 1..21: mol_type = other RNA
agttctgctactaacagcttt

SEQ ID NO: 9460 - RNA, 21 nt, synthetic construct
  misc_feature 1..21: note = Synthetic
  source 1..21: mol_type = other RNA
gttctgctactaacagctttg

SEQ ID NO: 9461 - RNA, 21 nt, synthetic construct
  misc_feature 1..21: note = Synthetic
  source 1..21: mol_type = other RNA
ttctgctactaacagctttgt

SEQ ID NO: 9462 - RNA, 21 nt, synthetic construct
  misc_feature 1..21: note = Synthetic
  source 1..21: mol_type = other RNA
tctgctactaacagctttgtg

SEQ ID NO: 9463 - RNA, 21 nt, synthetic construct
  misc_feature 1..21: note = Synthetic
  source 1..21: mol_type = other RNA
ctgctactaacagctttgtga

SEQ ID NO: 9464 - RNA, 21 nt, synthetic construct
  misc_feature 1..21: note = Synthetic
  source 1..21: mol_type = other RNA
tgctactaacagctttgtgac

SEQ ID NO: 9465 - RNA, 21 nt, synthetic construct
  misc_feature 1..21: note = Synthetic
  source 1..21: mol_type = other RNA
gctactaacagctttgtgact

SEQ ID NO: 9466 - RNA, 21 nt, synthetic construct
  misc_feature 1..21: note = Synthetic
  source 1..21: mol_type = other RNA
ctactaacagctttgtgactt

SEQ ID NO: 9467 - RNA, 21 nt, synthetic construct
  misc_feature 1..21: note = Synthetic
  source 1..21: mol_type = other RNA
tactaacagctttgtgacttt

SEQ ID NO: 9468 - RNA, 21 nt, synthetic construct
  misc_feature 1..21: note = Synthetic
  source 1..21: mol_type = other RNA
actaacagctttgtgactttg

SEQ ID NO: 9469 - RNA, 21 nt, synthetic construct
  misc_feature 1..21: note = Synthetic
  source 1..21: mol_type = other RNA
ctaacagctttgtgactttga

SEQ ID NO: 9470 - RNA, 21 nt, synthetic construct
  misc_feature 1..21: note = Synthetic
  source 1..21: mol_type = other RNA
taacagctttgtgactttgac

SEQ ID NO: 9471 - RNA, 21 nt, synthetic construct
  misc_feature 1..21: note = Synthetic
  source 1..21: mol_type = other RNA
aacagctttgtgactttgacc

SEQ ID NO: 9472 - RNA, 21 nt, synthetic construct
  misc_feature 1..21: note = Synthetic
  source 1..21: mol_type = other RNA
acagctttgtgactttgacca

SEQ ID NO: 9473 - RNA, 21 nt, synthetic construct
  misc_feature 1..21: note = Synthetic
  source 1..21: mol_type = other RNA
cagctttgtgactttgaccaa

SEQ ID NO: 9474 - RNA, 21 nt, synthetic construct
  misc_feature 1..21: note = Synthetic
  source 1..21: mol_type = other RNA
agctttgtgactttgaccaaa

SEQ ID NO: 9475 - RNA, 21 nt, synthetic construct
  misc_feature 1..21: note = Synthetic
  source 1..21: mol_type = other RNA
gctttgtgactttgaccaaac

SEQ ID NO: 9476 - RNA, 21 nt, synthetic construct
  misc_feature 1..21: note = Synthetic
  source 1..21: mol_type = other RNA
ctttgtgactttgaccaaaca

SEQ ID NO: 9477 - RNA, 21 nt, synthetic construct
  misc_feature 1..21: note = Synthetic
  source 1..21: mol_type = other RNA
tttgtgactttgaccaaacac

SEQ ID NO: 9478 - RNA, 21 nt, synthetic construct
  misc_feature 1..21: note = Synthetic
  source 1..21: mol_type = other RNA
ttgtgactttgaccaaacaca

SEQ ID NO: 9479 - RNA, 21 nt, synthetic construct
  misc_feature 1..21: note = Synthetic
  source 1..21: mol_type = other RNA
tgtgactttgaccaaacacac

SEQ ID NO: 9480 - RNA, 21 nt, synthetic construct
  misc_feature 1..21: note = Synthetic
  source 1..21: mol_type = other RNA
gtgactttgaccaaacacact

SEQ ID NO: 9481 - RNA, 21 nt, synthetic construct
  misc_feature 1..21: note = Synthetic
  source 1..21: mol_type = other RNA
tgactttgaccaaacacactt

SEQ ID NO: 9482 - RNA, 21 nt, synthetic construct
  misc_feature 1..21: note = Synthetic
  source 1..21: mol_type = other RNA
gactttgaccaaacacacttt

SEQ ID NO: 9483 - RNA, 21 nt, synthetic construct
  misc_feature 1..21: note = Synthetic
  source 1..21: mol_type = other RNA
actttgaccaaacacactttc

SEQ ID NO: 9484 - RNA, 21 nt, synthetic construct
  misc_feature 1..21: note = Synthetic
  source 1..21: mol_type = other RNA
ctttgaccaaacacactttct

SEQ ID NO: 9485 - RNA, 21 nt, synthetic construct
  misc_feature 1..21: note = Synthetic
  source 1..21: mol_type = other RNA
tttgaccaaacacactttctt

SEQ ID NO: 9486 - RNA, 21 nt, synthetic construct
  misc_feature 1..21: note = Synthetic
  source 1..21: mol_type = other RNA
ttgaccaaacacactttctta

SEQ ID NO: 9487 - RNA, 21 nt, synthetic construct
  misc_feature 1..21: note = Synthetic
  source 1..21: mol_type = other RNA
tgaccaaacacactttcttac

SEQ ID NO: 9488 - RNA, 21 nt, synthetic construct
  misc_feature 1..21: note = Synthetic
  source 1..21: mol_type = other RNA
gaccaaacacactttcttact

SEQ ID NO: 9489 - RNA, 21 nt, synthetic construct
  misc_feature 1..21: note = Synthetic
  source 1..21: mol_type = other RNA
accaaacacactttcttactt

SEQ ID NO: 9490 - RNA, 21 nt, synthetic construct
  misc_feature 1..21: note = Synthetic
  source 1..21: mol_type = other RNA
ccaaacacactttcttacttt

SEQ ID NO: 9491 - RNA, 21 nt, synthetic construct
  misc_feature 1..21: note = Synthetic
  source 1..21: mol_type = other RNA
caaacacactttcttactttt

SEQ ID NO: 9492 - RNA, 21 nt, synthetic construct
  misc_feature 1..21: note = Synthetic
  source 1..21: mol_type = other RNA
aaacacactttcttacttttg

SEQ ID NO: 9493 - RNA, 21 nt, synthetic construct
  misc_feature 1..21: note = Synthetic
  source 1..21: mol_type = other RNA
aacacactttcttacttttga

SEQ ID NO: 9494 - RNA, 21 nt, synthetic construct
  misc_feature 1..21: note = Synthetic
  source 1..21: mol_type = other RNA
acacactttcttacttttgag

SEQ ID NO: 9495 - RNA, 21 nt, synthetic construct
  misc_feature 1..21: note = Synthetic
  source 1..21: mol_type = other RNA
cacactttcttacttttgagg

SEQ ID NO: 9496 - RNA, 21 nt, synthetic construct
  misc_feature 1..21: note = Synthetic
  source 1..21: mol_type = other RNA
acactttcttacttttgagga

SEQ ID NO: 9497 - RNA, 21 nt, synthetic construct
  misc_feature 1..21: note = Synthetic
  source 1..21: mol_type = other RNA
cactttcttacttttgaggag

SEQ ID NO: 9498 - RNA, 21 nt, synthetic construct
  misc_feature 1..21: note = Synthetic
  source 1..21: mol_type = other RNA
actttcttacttttgaggaga

SEQ ID NO: 9499 - RNA, 21 nt, synthetic construct
  misc_feature 1..21: note = Synthetic
  source 1..21: mol_type = other RNA
ctttcttacttttgaggagaa

SEQ ID NO: 9500 - RNA, 21 nt, synthetic construct
  misc_feature 1..21: note = Synthetic
  source 1..21: mol_type = other RNA
tttcttacttttgaggagaag

SEQ ID NO: 9501 - RNA, 21 nt, synthetic construct
  misc_feature 1..21: note = Synthetic
  source 1..21: mol_type = other RNA
ttcttacttttgaggagaaga

SEQ ID NO: 9502 - RNA, 21 nt, synthetic construct
  misc_feature 1..21: note = Synthetic
  source 1..21: mol_type = other RNA
tcttacttttgaggagaagag

SEQ ID NO: 9503 - RNA, 21 nt, synthetic construct
  misc_feature 1..21: note = Synthetic
  source 1..21: mol_type = other RNA
cttacttttgaggagaagagg

SEQ ID NO: 9504 - RNA, 21 nt, synthetic construct
  misc_feature 1..21: note = Synthetic
  source 1..21: mol_type = other RNA
ttacttttgaggagaagaggt

SEQ ID NO: 9505 - RNA, 21 nt, synthetic construct
  misc_feature 1..21: note = Synthetic
  source 1..21: mol_type = other RNA
tacttttgaggagaagaggtt

SEQ ID NO: 9506 - RNA, 21 nt, synthetic construct
  misc_feature 1..21: note = Synthetic
  source 1..21: mol_type = other RNA
acttttgaggagaagaggttg

SEQ ID NO: 9507 - RNA, 21 nt, synthetic construct
  misc_feature 1..21: note = Synthetic
  source 1..21: mol_type = other RNA
cttttgaggagaagaggttgc

SEQ ID NO: 9508 - RNA, 19 nt, synthetic construct
  misc_feature 1..19: note = Synthetic
  source 1..19: mol_type = other RNA
ggtactccgcaagtaaaaa

SEQ ID NO: 9509 - RNA, 21 nt, synthetic construct
  misc_feature 1..21: note = Synthetic
  source 1..21: mol_type = other RNA
tttttacttgcggagtaccag

SEQ ID NO: 9510 - RNA, 19 nt, synthetic construct
  misc_feature 1..19: note = Synthetic
  source 1..19: mol_type = other RNA
cactcatcctacagactaa

SEQ ID NO: 9511 - RNA, 21 nt, synthetic construct
  misc_feature 1..21: note = Synthetic
  source 1..21: mol_type = other RNA
ttagtctgtaggatgagtgat

SEQ ID NO: 9512 - RNA, 19 nt, synthetic construct
  misc_feature 1..19: note = Synthetic
  source 1..19: mol_type = other RNA
gcttaactgttgtcgacta

SEQ ID NO: 9513 - RNA, 21 nt, synthetic construct
  misc_feature 1..21: note = Synthetic
  source 1..21: mol_type = other RNA
tagtcgacaacagttaagctg

SEQ ID NO: 9514 - RNA, 19 nt, synthetic construct
  misc_feature 1..19: note = Synthetic
  source 1..19: mol_type = other RNA
accttgactgtcaaagata

SEQ ID NO: 9515 - RNA, 21 nt, synthetic construct
  misc_feature 1..21: note = Synthetic
  source 1..21: mol_type = other RNA
tatctttgacagtcaaggtga

SEQ ID NO: 9516 - RNA, 19 nt, synthetic construct
  misc_feature 1..19: note = Synthetic
  source 1..19: mol_type = other RNA
cctacacgtttcacctgaa

SEQ ID NO: 9517 - RNA, 21 nt, synthetic construct
  misc_feature 1..21: note = Synthetic
  source 1..21: mol_type = other RNA
ttcaggtgaaacgtgtaggtc

SEQ ID NO: 9518 - RNA, 19 nt, synthetic construct
  misc_feature 1..19: note = Synthetic
  source 1..19: mol_type = other RNA
ggtgctggattccgacata

SEQ ID NO: 9519 - RNA, 21 nt, synthetic construct
  misc_feature 1..21: note = Synthetic
  source 1..21: mol_type = other RNA
tatgtcggaatccagcacccc

SEQ ID NO: 9520 - RNA, 19 nt, synthetic construct
  misc_feature 1..19: note = Synthetic
  source 1..19: mol_type = other RNA
ctggattccgacatcatta

SEQ ID NO: 9521 - RNA, 21 nt, synthetic construct
  misc_feature 1..21: note = Synthetic
  source 1..21: mol_type = other RNA
taatgatgtcggaatccagca

SEQ ID NO: 9522 - RNA, 19 nt, synthetic construct
  misc_feature 1..19: note = Synthetic
  source 1..19: mol_type = other RNA
gcaaaagattcagccgtaa

SEQ ID NO: 9523 - RNA, 21 nt, synthetic construct
  misc_feature 1..21: note = Synthetic
  source 1..21: mol_type = other RNA
ttacggctgaatcttttgcac

SEQ ID NO: 9524 - RNA, 19 nt, synthetic construct
  misc_feature 1..19: note = Synthetic
  source 1..19: mol_type = other RNA
caaaagattcagccgtaca

SEQ ID NO: 9525 - RNA, 21 nt, synthetic construct
  misc_feature 1..21: note = Synthetic
  source 1..21: mol_type = other RNA
tgtacggctgaatcttttgca

SEQ ID NO: 9526 - RNA, 19 nt, synthetic construct
  misc_feature 1..19: note = Synthetic
  source 1..19: mol_type = other RNA
ctgatgcattctgaatcga

SEQ ID NO: 9527 - RNA, 21 nt, synthetic construct
  misc_feature 1..21: note = Synthetic
  source 1..21: mol_type = other RNA
tcgattcagaatgcatcaggc

SEQ ID NO: 9528 - RNA, 21 nt, synthetic construct
  misc_feature 1..21: note = Synthetic
  source 1..21: mol_type = other RNA
gcgttctgtggttgtcaacag

SEQ ID NO: 9529 - RNA, 21 nt, synthetic construct
  misc_feature 1..21: note = Synthetic
  source 1..21: mol_type = other RNA
gttgacaaccacagaacgctg

SEQ ID NO: 9530 - RNA, 19 nt, synthetic construct
  misc_feature 1..19: note = Synthetic
  source 1..19: mol_type = other RNA
cttacgctgagtacttcga

SEQ ID NO: 9531 - RNA, 21 nt, synthetic construct
  misc_feature 1..21: note = Synthetic
  source 1..21: mol_type = other RNA
tcgaagtactcagcgtaagtt

SEQ ID NO: 9532 - RNA, 19 nt, synthetic construct
  misc_feature 1..19: note = Synthetic
  source 1..19: mol_type = other RNA
ggtactccgcaagtaaaaa

SEQ ID NO: 9533 - RNA, 21 nt, synthetic construct
  modified_base 1: mod_base = OTHER; note = thymine
  misc_feature 1..21: note = Synthetic
  source 1..21: mol_type = other RNA
tttttacttgcggagtaccag

SEQ ID NO: 9534 - RNA, 19 nt, synthetic construct
  misc_feature 1..19: note = Synthetic
  source 1..19: mol_type = other RNA
cactcatcctacagactaa

SEQ ID NO: 9535 - RNA, 21 nt, synthetic construct
  modified_base 1: mod_base = OTHER; note = thymine
  misc_feature 1..21: note = Synthetic
  source 1..21: mol_type = other RNA
ttagtctgtaggatgagtgat

SEQ ID NO: 9536 - RNA, 19 nt, synthetic construct
  misc_feature 1..19: note = Synthetic
  source 1..19: mol_type = other RNA
gcttaactgttgtcgacta

SEQ ID NO: 9537 - RNA, 21 nt, synthetic construct
  modified_base 1: mod_base = OTHER; note = thymine
  misc_feature 1..21: note = Synthetic
  source 1..21: mol_type = other RNA
tagtcgacaacagttaagctg

SEQ ID NO: 9538 - RNA, 19 nt, synthetic construct
  misc_feature 1..19: note = Synthetic
  source 1..19: mol_type = other RNA
accttgactgtcaaagata

SEQ ID NO: 9539 - RNA, 21 nt, synthetic construct
  modified_base 1: mod_base = OTHER; note = thymine
  misc_feature 1..21: note = Synthetic
  source 1..21: mol_type = other RNA
tatctttgacagtcaaggtga

SEQ ID NO: 9540 - RNA, 19 nt, synthetic construct
  misc_feature 1..19: note = Synthetic
  source 1..19: mol_type = other RNA
cctacacgtttcacctgaa

SEQ ID NO: 9541 - RNA, 21 nt, synthetic construct
  modified_base 1: mod_base = OTHER; note = thymine
  misc_feature 1..21: note = Synthetic
  source 1..21: mol_type = other RNA
ttcaggtgaaacgtgtaggtc

SEQ ID NO: 9542 - RNA, 19 nt, synthetic construct
  misc_feature 1..19: note = Synthetic
  source 1..19: mol_type = other RNA
ggtgctggattccgacata

SEQ ID NO: 9543 - RNA, 21 nt, synthetic construct
  modified_base 1: mod_base = OTHER; note = thymine
  misc_feature 1..21: note = Synthetic
  source 1..21: mol_type = other RNA
tatgtcggaatccagcacccc

SEQ ID NO: 9544 - RNA, 19 nt, synthetic construct
  misc_feature 1..19: note = Synthetic
  source 1..19: mol_type = other RNA
ctggattccgacatcatta

SEQ ID NO: 9545 - RNA, 21 nt, synthetic construct
  modified_base 1: mod_base = OTHER; note = thymine
  misc_feature 1..21: note = Synthetic
  source 1..21: mol_type = other RNA
taatgatgtcggaatccagca

SEQ ID NO: 9546 - RNA, 19 nt, synthetic construct
  misc_feature 1..19: note = Synthetic
  source 1..19: mol_type = other RNA
gcaaaagattcagccgtaa

SEQ ID NO: 9547 - RNA, 21 nt, synthetic construct
  modified_base 1: mod_base = OTHER; note = thymine
  misc_feature 1..21: note = Synthetic
  source 1..21: mol_type = other RNA
ttacggctgaatcttttgcac

SEQ ID NO: 9548 - RNA, 19 nt, synthetic construct
  misc_feature 1..19: note = Synthetic
  source 1..19: mol_type = other RNA
caaaagattcagccgtaca

SEQ ID NO: 9549 - RNA, 21 nt, synthetic construct
  modified_base 1: mod_base = OTHER; note = thymine
  misc_feature 1..21: note = Synthetic
  source 1..21: mol_type = other RNA
tgtacggctgaatcttttgca

SEQ ID NO: 9550 - RNA, 19 nt, synthetic construct
  misc_feature 1..19: note = Synthetic
  source 1..19: mol_type = other RNA
ctgatgcattctgaatcga

SEQ ID NO: 9551 - RNA, 21 nt, synthetic construct
  modified_base 1: mod_base = OTHER; note = thymine
  misc_feature 1..21: note = Synthetic
  source 1..21: mol_type = other RNA
tcgattcagaatgcatcaggc

SEQ ID NO: 9552 - RNA, 21 nt, synthetic construct
  misc_feature 1..21: note = Synthetic
  source 1..21: mol_type = other RNA
gcgttctgtggttgtcaacag

SEQ ID NO: 9553 - RNA, 21 nt, synthetic construct
  misc_feature 1..21: note = Synthetic
  source 1..21: mol_type = other RNA
gttgacaaccacagaacgctg

SEQ ID NO: 9554 - RNA, 19 nt, synthetic construct
  misc_feature 1..19: note = Synthetic
  source 1..19: mol_type = other RNA
cttacgctgagtacttcga

SEQ ID NO: 9555 - RNA, 21 nt, synthetic construct
  modified_base 1: mod_base = OTHER; note = thymine
  misc_feature 1..21: note = Synthetic
  source 1..21: mol_type = other RNA
tcgaagtactcagcgtaagtt

SEQ ID NO: 9556-9599 - skipped (44 entries)

SEQ ID NO: 9600 - DNA, 20 bp, synthetic construct
  misc_feature 1..20: note = Synthetic
  source 1..20: mol_type = other DNA
cagctgccagtcgtaggtgt

SEQ ID NO: 9601 - DNA, 20 bp, synthetic construct
  misc_feature 1..20: note = Synthetic
  source 1..20: mol_type = other DNA
tagccttccccatgggcatt

SEQ ID NO: 9602 - DNA, 20 bp, synthetic construct
  misc_feature 1..20: note = Synthetic
  source 1..20: mol_type = other DNA
atctcctggaactgaggtga

SEQ ID NO: 9603 - DNA, 20 bp, synthetic construct
  misc_feature 1..20: note = Synthetic
  source 1..20: mol_type = other DNA
gatcacttggttggggcctg

SEQ ID NO: 9604 - DNA, 20 bp, synthetic construct
  misc_feature 1..20: note = Synthetic
  source 1..20: mol_type = other DNA
ctgcatctgcctgaggaggc

SEQ ID NO: 9605 - DNA, 20 bp, synthetic construct
  misc_feature 1..20: note = Synthetic
  source 1..20: mol_type = other DNA
ctcatctttgacagtcaagg

SEQ ID NO: 9606 - DNA, 20 bp, synthetic construct
  misc_feature 1..20: note = Synthetic
  source 1..20: mol_type = other DNA
atccccttcagcctctcagt

SEQ ID NO: 9607 - DNA, 20 bp, synthetic construct
  misc_feature 1..20: note = Synthetic
  source 1..20: mol_type = other DNA
cccccaggaggaccccaatc

SEQ ID NO: 9608 - DNA, 16 bp, synthetic construct
  misc_feature 1..16: note = Synthetic
  source 1..16: mol_type = other DNA
tctttgacagtcaagg

SEQ ID NO: 9609 - DNA, 16 bp, synthetic construct
  misc_feature 1..16: note = Synthetic
  source 1..16: mol_type = other DNA
tgtcggaatccagcac

SEQ ID NO: 9610 - DNA, 16 bp, synthetic construct
  misc_feature 1..16: note = Synthetic
  source 1..16: mol_type = other DNA
atgatgtcggaatcca

SEQ ID NO: 9611 - DNA, 16 bp, synthetic construct
  misc_feature 1..16: note = Synthetic
  source 1..16: mol_type = other DNA
acggctgaatcttttg

SEQ ID NO: 9612 - DNA, 16 bp, synthetic construct
  misc_feature 1..16: note = Synthetic
  source 1..16: mol_type = other DNA
tacggctgaatctttt

SEQ ID NO: 9613 - DNA, 16 bp, synthetic construct
  misc_feature 1..16: note = Synthetic
  source 1..16: mol_type = other DNA
gcatctgcctgaggag

SEQ ID NO: 9614 - DNA, 16 bp, synthetic construct
  misc_feature 1..16: note = Synthetic
  source 1..16: mol_type = other DNA
catctttgacagtcaa

SEQ ID NO: 9615 - DNA, 16 bp, synthetic construct
  misc_feature 1..16: note = Synthetic
  source 1..16: mol_type = other DNA
cccaggaggaccccaa

SEQ ID NO: 9616 - DNA, 18 bp, synthetic construct
  misc_feature 1..18: note = Synthetic
  source 1..18: mol_type = other DNA
atctttgacagtcaaggt

SEQ ID NO: 9617 - DNA, 18 bp, synthetic construct
  misc_feature 1..18: note = Synthetic
  source 1..18: mol_type = other DNA
atgtcggaatccagcacc

SEQ ID NO: 9618 - DNA, 18 bp, synthetic construct
  misc_feature 1..18: note = Synthetic
  source 1..18: mol_type = other DNA
aatgatgtcggaatccag

SEQ ID NO: 9619 - DNA, 18 bp, synthetic construct
  misc_feature 1..18: note = Synthetic
  source 1..18: mol_type = other DNA
tacggctgaatcttttgc

SEQ ID NO: 9620 - DNA, 18 bp, synthetic construct
  misc_feature 1..18: note = Synthetic
  source 1..18: mol_type = other DNA
gtacggctgaatcttttg

SEQ ID NO: 9621 - DNA, 18 bp, synthetic construct
  misc_feature 1..18: note = Synthetic
  source 1..18: mol_type = other DNA
tgcatctgcctgaggagg

SEQ ID NO: 9622 - DNA, 18 bp, synthetic construct
  misc_feature 1..18: note = Synthetic
  source 1..18: mol_type = other DNA
tcatctttgacagtcaag

SEQ ID NO: 9623 - DNA, 18 bp, synthetic construct
  misc_feature 1..18: note = Synthetic
  source 1..18: mol_type = other DNA
ccccaggaggaccccaat

SEQ ID NO: 9624 - DNA, 16 bp, synthetic construct
  misc_feature 1..16: note = Synthetic
  source 1..16: mol_type = other DNA
ggctactacgccgtca

SEQ ID NO: 9625 - DNA, 18 bp, synthetic construct
  misc_feature 1..18: note = Synthetic
  source 1..18: mol_type = other DNA
ttagtttaatcacgctcg

1. A composition comprising an agent that blocks AAV binding to an AAV receptor (AAVR) and a delivery molecule that delivers the agent to the liver.

2. The composition of claim 1, wherein the agent comprises (a) a small-interfering RNA (siRNA); (b) an anti-AAVR antibody; (c) a small molecule; or (d) an antisense oligonucleotide (ASO).

3. The composition of claim 2, wherein the siRNA comprises;
(a) at least 19 contiguous nucleotides of any of SEQ ID Nos: 4300-9527;
(b) any of the sequences of SEQ ID NOs: 4300-9527; and/or
(c) wherein the siRNA is no more than 21, 25, or 31 nucleotides in length.

4.-8. (canceled)

9. The composition of claim 2, wherein the ASO comprises any of the sequences of SEQ ID Nos: 9600-9623, or comprises at least 14 consecutive nucleotides of any of SEQ ID Nos: 9600-9623.

10. The composition of claim 1, wherein the delivery molecule comprises one or more of the following: lactose, galactose, N-acetylgalactosamine (GalNAc), galactosamine, N-formylgalactosamine, N-acetylgalactosamine, N-propionylgalactosamine, N-butanoylgalactosamine, N-isobutanoyl-galactosamine, and cholesterol, or a derivative thereof.

11. (canceled)

12. The composition of claim 1, wherein the delivery molecule comprises a lipid nanoparticle (LNP) or an AAV.

13. (canceled)

14. A method comprising: (a) administering to a subject an agent that blocks AAV binding to an AAV receptor (AAVR) in the liver, and then (b) administering an AAV vector to the subject.

15. The method of claim 14, wherein the AAV vector further comprises a payload, wherein the payload comprises (a) a therapeutic agent to prevent or treat disease; and/or (b) a guide RNA, an endonuclease, a tRNA, a small molecule, an antisense oligonucleotide (ASO), an antibody, a small-interfering RNA (siRNA), or an RNAi agent.

16. (canceled)

17. (canceled)

18. A method of increasing the percentage of AAV delivered to a non-liver target in a subject, comprising (a) a pre-conditioning step comprising administering to the subject a composition comprising an agent that blocks AAV binding to an AAV receptor (AAVR) in the liver, and then (b) administering an AAV vector targeting a non-liver tissue.

19. The method of claim 14, wherein step (a) comprises administering to the subject a composition comprising the agent that blocks AAV binding to an AAVR and a delivery molecule that delivers the agent to the liver.

20. A method of decreasing tropism of AAV to the liver in a subject comprising (a) administering to the subject a composition of claim 1, and then (b) administering an AAV vector targeting a non-liver tissue.

21. The method of claim 14, wherein:
(a) administering to the subject agent that blocks AAV binding to an AAV receptor (AAVR) in the liver temporarily blocks AAV binding to AAV receptors in the liver;
(b) administering to the subject the agent that blocks AAV binding to an AAVR in the liver is part of a pre-conditioning step; and/or
(c) administering to the subject the agent that blocks AAV binding to an AAVR in the liver occurs about 1 day, about 2 days, about 3 days, about 4 days, about 5 days, about 6 days, about 7 days, about 8 days, about 9 days, about 10 days, about 11 days, about 12 days, about 13 days, about 14 days, about 15 days, about 16, days, about 17 days, about 18 days, about 19 days, about 20 days, or about 21 days prior to administering the AAV vector.

22.-25. (canceled)

26. The method of claim 19, wherein (a) administering the composition immediately precedes administering the AAV vector; or (b) the composition and the AAV vector are co-administered.

27. (canceled)

28. The method of claim 14, wherein step (a) comprises administering to the subject a composition comprising the agent, wherein the agent comprises a small-interfering RNA (siRNA) or an antisense oligonucleotide (ASO).

29. The method of claim 28, wherein the composition comprises:
(a) an siRNA that is conjugated to a liver-targeting moiety;
(b) an N-acetylgalactosamine (GalNAc)-conjugated siRNA; and/or
(c) an siRNA encapsulated in a lipid nanoparticle (LNP).

30.-32. (canceled)

33. The method of claim 18, wherein the composition comprises a pharmaceutically acceptable carrier.

34. The method of claim 33, wherein the method comprises administering the composition to the subject by intraperitoneal injection.

35.-41. (canceled)

42. The method of claim 14, wherein the AAV vector targets a non-liver tissue, wherein the non-liver tissue is the brain; central nervous system; spinal cord; eye; retina; bone; cardiac muscle, skeletal muscle, and/or smooth muscle; lung; pancreas; heart; and/or kidney.

43. (canceled)

44. The method of claim 18, wherein administering the composition in step (a) increases the percentage of AAV delivered to a non-liver target.

45. The method of claim 14, wherein the method results in at least a 10%, 30%, 50%, 75%, 100%, 125%, 150%, 200%, 250%, 300%, 350%, 400%, 450%, 500%, 600%, 700%, 800%, 900%, or 1000% increase of AAV in brain; central nervous system; spinal cord; eye; retina; bone; cardiac muscle, skeletal muscle, and/or smooth muscle; lung; pancreas; heart; and/or kidney as compared to the AAV in the corresponding tissue of a control subject that received the AAV but did not receive the agent that blocks AAV binding to an AAV receptor (AAVR) in the liver.

46. (canceled)

47. The method of claim 14, wherein the AAV vector further comprises one or more molecules for enhancing tropism for the target host cells or tissue.

48. The method of claim 14, wherein the subject is a human subject.

49. The method of claim 14, wherein the AAV vector comprises a single nucleic acid molecule encoding one or more guide RNAs and a Cas9, wherein the single nucleic acid molecule comprises:
a. a first nucleic acid encoding one or more spacer sequences selected from any one of SEQ ID NOs: 1-35, 1000-1078, or 3000-3069, and a second nucleic acid encoding a Staphylococcus aureus Cas9 (SaCas9); or
b. a first nucleic acid encoding one or more spacer sequences selected from any one of SEQ ID NOs: 100-225, 2000-2116, or 4000-4251, and a second nucleic acid encoding a Staphylococcus lugdunensis (SluCas9); or
c. a first nucleic acid encoding one or more spacer sequences comprising at least 20 contiguous nucleotides of a spacer sequence selected from any one of SEQ ID NOs: 1-35, 1000-1078, or 3000-3069, and a second nucleic acid encoding a Staphylococcus aureus Cas9 (SaCas9); or
d. a first nucleic acid encoding one or more spacer sequences comprising at least 20 contiguous nucleotides of a spacer sequence selected from any one of SEQ ID NOs: 100-225, 2000-2116, or 4000-4251, and a second nucleic acid encoding a Staphylococcus lugdunensis (SluCas9); or
e. a first nucleic acid encoding one or more spacer sequences that is at least 90% identical to any one of SEQ ID NOs: 1-35, 1000-1078, or 3000-3069, and a second nucleic acid encoding a Staphylococcus aureus Cas9 (SaCas9); or
f. a first nucleic acid encoding one or more spacer sequences that is at least 90% identical to any one of SEQ ID NOs: 100-225, 2000-2116, or 4000-4251, and a second nucleic acid encoding a Staphylococcus lugdunensis (SluCas9); or
g. a first nucleic acid encoding a pair of guide RNAs comprising a first and second spacer sequence selected from any one of the following pairs of spacer sequences: SEQ ID NOs: 10 and 15; 10 and 16; 12 and 16; 1001 and 1005; 1001 and 15; 1001 and 16; 1003 and 1005; 16 and 1003; 12 and 1010; 12 and 1012; 12 and 1013; 10 and 1016; 1017 and 1005; 1017 and 16; 1018 and 16; 15 and 10; 16 and 10; 16 and 12; 1005 and 1001; 15 and 1001; 16 and 1001; 1005 and 1003; 1003 and 16; 1010 and 12; 1012 and 12; 1013 and 12; 1016 and 10; 1005 and 1017; 16 and 1017; and 16 and 1018; and a second nucleic acid encoding a Staphylococcus aureus Cas9 (SaCas9); or
h. a first nucleic acid encoding a pair of guide RNAs comprising at least 17, 18, 19, 20, or 21 contiguous nucleotides of a first and second spacer sequence selected from any one of the following pairs of spacer sequences: SEQ ID NOs: 10 and 15; 10 and 16; 12 and 16; 1001 and 1005; 1001 and 15; 1001 and 16; 1003 and 1005; 16 and 1003; 12 and 1010; 12 and 1012; 12 and 1013; 10 and 1016; 1017 and 1005; 1017 and 16; 1018 and 16; 15 and 10; 16 and 10; 16 and 12; 1005 and 1001; 15 and 1001; 16 and 1001; 1005 and 1003; 1003 and 16; 1010 and 12; 1012 and 12; 1013 and 12; 1016 and 10; 1005 and 1017; 16 and 1017; and 16 and 1018; and a second nucleic acid encoding a Staphylococcus aureus Cas9 (SaCas9); or
i. a first nucleic acid encoding a pair of guide RNAs that is at least 90% identical to a first and second spacer sequence selected from any one of the following pairs of spacer sequences: SEQ ID NOs: 10 and 15; 10 and 16; 12 and 16; 1001 and 1005; 1001 and 15; 1001 and 16; 1003 and 1005; 16 and 1003; 12 and 1010; 12 and 1012; 12 and 1013; 10 and 1016; 1017 and 1005; 1017 and 16; 1018 and 16; 15 and 10; 16 and 10; 16 and 12; 1005 and 1001; 15 and 1001; 16 and 1001; 1005 and 1003; 1003 and 16; 1010 and 12; 1012 and 12; 1013 and 12; 1016 and 10; 1005 and 1017; 16 and 1017; and 16 and 1018; and a second nucleic acid encoding a Staphylococcus aureus Cas9 (SaCas9); or
j. a first nucleic acid encoding a pair of guide RNAs comprising a first and second spacer sequence selected from any one of the following pairs of spacer sequences: SEQ ID NOs: 148 and 134; 149 and 135; 150 and 135; 131 and 136; 151 and 136; 139 and 131; 139 and 151; 140 and 131; 140 and 151; 141 and 148; 144 and 149; 144 and 150; 145 and 131; 145 and 151; 146 and 148; 134 and 148; 135 and 149; 135 and 150; 136 and 131; 136 and 151; 131 and 139; 151 and 139; 131 and 140; 151 and 140; 148 and 141; 149 and 144; 150 and 144; 131 and 145; 151 and 145; and 148 and 146; and a second nucleic acid encoding a Staphylococcus lugdunensis (SluCas9); or
k. a first nucleic acid encoding a pair of guide RNAs comprising at least 17, 18, 19, 20, or 21 contiguous nucleotides of a first and second spacer sequence selected from any one of the following pairs of spacer sequences: SEQ ID NOs: 148 and 134; 149 and 135; 150 and 135; 131 and 136; 151 and 136; 139 and 131; 139 and 151; 140 and 131; 140 and 151; 141 and 148; 144 and 149; 144 and 150; 145 and 131; 145 and 151; 146 and 148; 134 and 148; 135 and 149; 135 and 150; 136 and 131; 136 and 151; 131 and 139; 151 and 139; 131 and 140; 151 and 140; 148 and 141; 149 and 144; 150 and 144; 131 and 145; 151 and 145; and 148 and 146; and a second nucleic acid encoding a Staphylococcus lugdunensis (SluCas9); or
l. a first nucleic acid encoding a pair of guide RNAs that is at least 90% identical to a first and second spacer sequence selected from any one of the following pairs of spacer sequences: SEQ ID NOs: 148 and 134; 149 and 135; 150 and 135; 131 and 136; 151 and 136; 139 and 131; 139 and 151; 140 and 131; 140 and 151; 141 and 148; 144 and 149; 144 and 150; 145 and 131; 145 and 151; 146 and 148; 134 and 148; 135 and 149; 135 and 150; 136 and 131; 136 and 151; 131 and 139; 151 and 139; 131 and 140; 151 and 140; 148 and 141; 149 and 144; 150 and 144; 131 and 145; 151 and 145; and 148 and 146; and a second nucleic acid encoding a Staphylococcus lugdunensis (SluCas9); or
m. a first nucleic acid encoding a pair of guide RNAs that is at least 90% identical to a first and second spacer sequence selected from any one of the following pairs of spacer sequences:
i. SEQ ID NOS: 148 and 134,
ii. SEQ ID Nos: 145 and 131,
iii. SEQ ID Nos: 144 and 149;
iv. SEQ ID Nos: 144 and 150;
v. SEQ ID Nos: 146 and 148;
and a second nucleic acid encoding a Staphylococcus lugdunensis (SluCas9); or
n. a first nucleic acid encoding a pair of guide RNAs that is at least 90% identical to a first and second spacer sequence selected from any one of the following pairs of spacer sequences:
i. SEQ ID NOs: 12 and 1013; and
ii. SEQ ID Nos: 12 and 1016;
and a second nucleic acid encoding a SaCas9-KKH.

50. (canceled)

51. The method of claim 14, wherein the AAV vector is an AAV9 vector.

52. The method of claim 14, wherein the agent comprises an siRNA, an anti-AAVR antibody, a small molecule, or an antisense oligonucleotide (ASO).

53. The method of claim 52, wherein the siRNA comprises;
(a) at least 19 contiguous nucleotides of any of SEQ ID Nos: 4300-9527;
(b) any of the sequences of SEQ ID NOs: 4300-9527;
(c) at least 19 contiguous nucleotides of any of SEQ ID NOs: 9508-9531; or
(d) any of the sequences of SEQ ID NOs: 9508-9531.

54.-56. (canceled)

57. The method of claim 52 wherein the siRNA is no more than 21, 25, or 31 nucleotides in length.

58.-60. (canceled)

61. The method of claim 52, wherein the ASO
(a) comprises any of the sequences of SEQ ID Nos: 9600-9623, or comprises at least 14 consecutive nucleotides of any of SEQ ID Nos: 9600-9623; and/or
(b) is between 14-35, 15-30, or 15-25 nucleotides in length.

62. (canceled)
